United States Patent Application Publication US 2023/0357754 A1 - sequence listing, part 2

SEQ ID NO: 3976 - DNA, 1167 bp, Homo Sapiens
tgtccacccaaatgccgctgcgagaagctgctcttctactgcgactctcagggcttccactcagtgccaaacgccacagacaagggctctctgggcctgtccctgaggcacaatcacatcacagagctcgaaagagatcaatttgccagcttcagtcaacttacttggctccacttagatcacaatcaaatttcaacagtaaaagaagatgcttttcaaggactatataaacttaaggaattaatcttaagttccaacaaaatattttacttgccaaacacaacttttacccaactgattaacctgcaaaatttggacctgtcttttaatcagctgtcatctctgcacccagagctcttctatggccttcggaagctgcagaccttgcatttacgttccaactccctgcggactatcccagtacgcctgttctgggactgtcgtagtctggagtttctggatttgagcacaaatcgtttgcgaagtttggctcgcaatggatttgcaggattaattaaactgagagagcttcacctagagcacaaccagctgacgaagattaattttgctcatttcctacggctaagcagtctgcacacgctcttcttacaatggaacaaaatcagcaacttgacatgtgggatggagtggacctggggcactttagaaaagctagacctgactggaaatgaaatcaaagccatcgacttgacagtgtttgaaacgatgcccaatcttaaaatactcctcatggataacaacaagttaaacagccttgattccaagatcttaaactccctgagatccctcacaaccgttggtctctctggcaatctgtgggaatgcagcgcccgaatatgtgctctggcctcctggctgggcagtttccaaggtcggtgggaacactccatcctatgccacagtcctgaccacacccaaggagaggatattctagatgcagtccatggatttcagctctgctggaatttgtcaaccactgtcactgtcatggctacaacttatagagatccaaccactgaatatacaaaaagaataagctcatcaagttaccatgtgggagacaaagaaatcccaactactgcaggcatagcagttactaccgaggaacactttcctgaaccagacaatgccatcttcactcagcgg

SEQ ID NO: 3977 - DNA, 1167 bp, Homo Sapiens
gaacgaggatgccctaagggctgtaggtgtgaaggcaaaatggtatattgtgaatctcagaaattacaggagataccctcaagtatatctgctggttgcttaggtttgtcccttcgctataacagccttcaaaaacttaagtataatcaatttaaagggctcaaccagctcacctggctataccttgaccataaccatatcagcaatattgacgaaaatgcttttaatggaatacgcagactcaaagagctgattcttagttccaatagaatctcctattttcttaacaataccttcagacctgtgacaaatttacggaacttggatctgtcctataatcagctgcattctctgggatctgaacagtttcggggcttgcggaagctgctgagtttacatttacggtctaactccctgagaaccatccctgtgcgaatattccaagactgccgcaacctggaacttttggacctgggatataaccggatccgaagtttagccaggaatgtctttgctggcatgatcagactcaaagaacttcacctggagcacaatcaattttccaagctcaacctggccctttttccaaggttggtcagccttcagaacctttacttgcagtggaataaaatcagtgtcataggacagaccatgtcctggacctggagctccttacaaaggcttgatttatcaggcaatgagatcgaagctttcagtggacccagtgttttccagtgtgtcccgaatctgcagcgcctcaacctggattccaacaagctcacatttattggtcaagagattttggattcttggatatccctcaatgacatcagtcttgctgggaatatatgggaatgcagcagaaatatttgctcccttgtaaactggctgaaaagttttaaaggtctaagggagaatacaattatctgtgccagtcccaaagagctgcaaggagtaaatgtgatcgatgcagtgaagaactacagcatctgtggcaaaagtactacagagaggtttgatctggccagggctctcccaaagccgacgtttaagcccaagctccccaggccgaagcatgagagcaaaccccctttgcccccgacggtgggagccacagagcccggcccagagaccgatgctgacgccgagcacatctctttccataaa

SEQ ID NO: 3978 - DNA, 1182 bp, Homo Sapiens
cagagagcttgcccaaagaactgcagatgtgatggcaaaattgtgtactgtgagtctcatgctttcgcagatatccctgagaacatttctggagggtcacaaggcttatcattaaggttcaacagcattcagaagctcaaatccaatcagtttgccggccttaaccagcttatatggctttatcttgaccataattacattagctcagtggatgaagatgcatttcaagggatccgtagactgaaagaattaattctaagctccaacaaaattacttatctgcacaataaaacatttcacccagttcccaatctccgcaatctggacctctcctacaataagcttcagacattgcaatctgaacaatttaaaggccttcggaaactcatcattttgcacttgagatctaactcactaaagactgtgcccataagagtttttcaagactgtcggaatcttgattttttggatttgggttacaatcgtcttcgaagcttgtcccgaaatgcatttgctggcctcttgaagttaaaggagctccacctggagcacaaccagttttccaagatcaactttgctcattttccacgtctcttcaacctccgctcaatttacttacaatggaacaggattcgctccattagccaaggtttgacatggacttggagttccttacacaacttggatttatcagggaatgacatccaaggaattgagccgggcacatttaaatgcctccccaatttacaaaaattgaatttggattccaacaagctcaccaatatctcacaggaaactgtcaatgcgtggatatcattaatatccatcacattgtctggaaatatgtgggaatgcagtcggagcatttgtcctttattttattggcttaagaatttcaaaggaaataaggaaagcaccatgatatgtgcgggacctaagcacatccagggtgaaaaggttagtgatgcagtggaaacatataatatctgttctgaagtccaggtggtcaacacagaaagatcacacctggtgccccaaactccccagaaacctctgattatccctagacctaccatcttcaaacctgacgtcacccaatccacctttgaaacaccaagcccttccccagggtttcagattcctggcgcagagcaagagtatgagcatgtttcatttcacaaa

SEQ ID NO: 3979 - DNA, 783 bp, Homo Sapiens
cagtcatctacaaattttgtagactgcagccagcagggtctggccgaaatcccttcccatttacctcctcagactcgaacgctgcatttacaagataatcagatacaccatcttcctgcttttgcatttaggtcagtgccatggctcatgaccttaaacttgtccaacaattccctttcaaatctggcccctggagctttccatgggcttcagcacttgcaggttttaaatctaacccagaattcactcctttccctggaaagcagacttttccattccctccctcagctgagggagcttgatttgtcatcaaacaacataagccaccttcccacatccttgggagagacttgggagaacctaactatacttgcggttcaacaaaaccagcttcagcagcttgatcgagcgctcctggaatccatgcccagtgtgaggcttttacttctcaaggacaacctctggaaatgcaattgccacttgctcggtcttaaactctggctggagaaatttgtctataaagggggactaacagacggcatcatctgtgaatcaccagacacctggaagggaaaggacctccttaggatccctcatgagctgtaccagccctgccctcttcctgctcctgatccagtgtcctcgcaggctcagtggcccggctctgcccacggtgtggtcctgaggcctcctgagaaccacaacgcgggggagcgagaactcttggagtgcgagctcaaacccaagccaaggccggccaacctgcgtcatgccattgccact

SEQ ID NO: 3980 - DNA, 825 bp, Homo Sapiens
ctccccacctgccctttctcctgcaagtgtgacagccgcagcctggaggtggactgcagtggccttggcctcaccacggtgcccccagacgtgcccgcagccacccgaaccctcttgctcttgaacaataagctgagtgccctgccaagctgggctttcgccaacctctccagcctgcagcggttggacctgtccaacaacttcctggaccggctgccccgctccattttcggggacctgacgaatctgactgagcttcagctgcgcaataacagcatcaggaccctggacagggacctgctgcggcactcgccgctgctccgccacctggacctgtccatcaacggcctggcccagttgccccctggtcttttcgacgggctcctggctctgcgctccctctcgcttcgctccaaccgtctgcagaatctggaccggctgacatttgaacccctagcaaacctgcagctgctgcaggtcggggataacccctgggagtgtgactgtaacctgcgtgagttcaaacactggatggagtggttctcctaccgagggggacgcttggaccagcttgcctgcaccctgcccaaggagctgagggggaaggacatgcggatggtccccatggagatgttcaactactgctcccagctggaggacgagaatagctcagctgggctggatattcctgggccaccctgcaccaaggccagtccagagcctgctaagcccaagcccggggctgagccggagccggagcccagcacagcctgcccacagaagcagaggcaccggccggcgagcgtgaggcgagccatgggcacg

SEQ ID NO: 3981 - DNA, 861 bp, Homo Sapiens
gttcgcagcgtggattttaaccgaggcacggacaacatcaccgtgaggcagggggacacagccatcctcaggtgcgttgtagaagacaagaactcaaaggtggcctggttgaaccgttctggcatcatttttgctggacatgacaagtggtctctggacccacgggttgagctggagaaacgccattctctggaatacagcctccgaatccagaaggtggatgtctatgatgagggttcctacacttgctcagttcagacacagcatgagcccaagacctcccaagtttacttgatcgtacaagtcccaccaaagatctccaatatctcctcggatgtcactgtgaatgagggcagcaacgtgactctggtctgcatggccaatggccgtcctgaacctgttatcacctggagacaccttacaccaactggaagggaatttgaaggagaagaagaatatctggagatccttggcatcaccagggagcagtcaggcaaatatgagtgcaaagctgccaacgaggtctcctcggcggatgtcaaacaagtcaaggtcactgtgaactatcctcccactatcacagaatccaagagcaatgaagccaccacaggacgacaagcttcactcaaatgtgaggcctcggcagtgcctgcacctgactttgagtggtaccgggatgacactaggataaatagtgccaatggccttgagattaagagcacggagggccagtcttccctgacggtgaccaacgtcactgaggagcactacggcaactacacctgtgtggctgccaacaagctgggggtcaccaatgccagcctagtccttttcagacctgggtcggtgagaggaataaat

SEQ ID NO: 3982 - DNA, 777 bp, Homo Sapiens
atgcaacaggacggacttggagtagggacaaggaacggaagtgggaaggggaggagcgtgcacccctcctggccttggtgcgcgccgcgccccctaaggtactttggaagggacgcgcgggccagacgcgcccagacggccgcgatggcgctgttggccggcgggctctccagagggctgggctcccacccggccgccgcaggccgggacgcggtcgtcttcgtgtggcttctgcttagcacctggtgcacagctcctgccagggccatccaggtgaccgtgtccaacccctaccacgtggtgatcctcttccagcctgtgaccctgccctgtacctaccagatgacctcgacccccacgcaacccatcgtcatctggaagtacaagtctttctgccgggaccgcatcgccgatgccttctccccggccagcgtcgacaaccagctcaatgcccagctggcagccgggaacccaggctacaacccctacgttgagtgccaggacagcgtgcgcaccgtcagggtcgtggccaccaagcagggcaacgctgtgaccctgggagattactaccagggccggaggattaccatcaccggaaatgctgacctgacctttgaccagacggcgtggggggacagtggtgtgtattactgctccgtggtctcagcccaggacctccaggggaacaatgaggcctacgcagagctcatcgtccttgggaggacctcaggggtggctgagctcttacctggttttcaggcggggcccatagaagac

SEQ ID NO: 3983 - DNA, 513 bp, Homo Sapiens
ctccctggtgttggcctcacaccttcagctgcccagactgcccgtcagcaccccaagatgcatcttgcccacagcaccctcaaacctgctgctcacctcattggagaccccagcaagcagaactcactgctctggagagcaaacacggaccgtgccttcctccaggatggtttctccttgagcaacaattctctcctggtccccaccagtggcatctacttcgtctactcccaggtggtcttctctgggaaagcctactctcccaaggccacctcctccccactctacctggcccatgaggtccagctcttctcctcccagtaccccttccatgtgcctctcctcagctcccagaagatggtgtatccagggctgcaggaaccctggctgcactcgatgtaccacggggctgcgttccagctcacccagggagaccagctatccacccacacagatggcatcccccacctagtcctcagccctagtactgtcttctttggagccttcgctctg

SEQ ID NO: 3984 - DNA, 588 bp, Homo Sapiens
caggatcagggaggactggtaacggagacggccgaccccggggcacaggcccagcaaggactggggtttcagaagctgccagaggaggagccagaaacagatctcagccccgggctcccagctgcccacctcataggcgctccgctgaaggggcaggggctaggctgggagacgacgaaggaacaggcgtttctgacgagcgggacgcagttctcggacgccgaggggctggcgctcccgcaggacggcctctattacctctactgtctcgtcggctaccggggccgggcgccccctggcggcggggacccccagggccgctcggtcacgctgcgcagctctctgtaccgggcggggggcgcctacgggccgggcactcccgagctgctgctcgagggcgccgagacggtgactccagtgctggacccggccaggagacaagggtacgggcctctctggtacacgagcgtggggttcggcggcctggtgcagctccggaggggcgagagggtgtacgtcaacatcagtcaccccgatatggtggacttcgcgagagggaagaccttctttggggccgtgatggtgggg

SEQ ID NO: 3985 - DNA, 4125 bp, Homo Sapiens
aaccacactggccgcatcaaggtggtctttactccgagcatctgtaaagtgacctgcaccaagggcagctgtcagaacagctgtgagaaggggaacaccaccactctcattagtgagaatggtcatgctgccgacaccctgacggccacgaacttccgagtggtaatttgccatcttccatgtatgaatggtggccagtgcagttcaagggacaaatgtcagtgccctccaaatttcacaggaaaactttgtcagatcccagtccatggtgccagcgtgcctaaactttatcagcattcccagcagccaggcaaggcgttggggacgcatgtcatccattcaacacataccttgcctctgaccgtgactagccagcaaggagtcaaagtgaaatttcctcctaacatagtcaatatccatgtgaaacatcctcctgaagcttccgtccagatacatcaggtttcaagaattgatggcccaacaggccagaagacaaaagaagctcaaccaggccaatcccaagtctcgtaccaagggcttcctgtccagaagacccagaccatacattccacatactcccaccagcaggtcattcctcacgtctaccccgtggctgctaagacacagcttggccggtgcttccaggaaaccattgggtcacagtgtggcaaagcgctccctggcctttcaaagcaagaggactgctgtggaactgtgggtacctcctggggctttaacaaatgccagaaatgccccaagaaaccatcttatcatggatacaaccaaatgatggaatgcctaccgggttataagcgggttaacaacaccttttgccaagatattaatgaatgtcagctacaaggtgtatgccctaatggtgagtgtttgaataccatgggcagctatcgatgtacctgcaaaataggatttgggccggatcctaccttttcaagttgtgttcctgatccccctgtgatctcggaagagaaagggccctgttaccgacttgtcagttctggaagacagtgtatgcaccctctgtctgttcacctcaccaagcagctctgctgttgtagtgtgggcaaggcctggggcccacactgtgagaaatgtccccttccaggcacagctgcttttaaggaaatctgtcctggtggaatgggttatacggtttctggcgttcatagacgcaggccaatccatcaccatgtaggtaaaggacctgtatttgtcaagccaaagaacactcaacctgttgctaaaagtactcatcctccacctctcccagccaaggaagagccagtggaggccctgaccttctcccgggaacacgggccaggagtggcggagccagaagtggcaactgcaccccctgaaaaggaaataccttcattggatcaagagaaaaccaaacttgagcctggtcaaccccagctgtctccaggcatttccactattcatctgcatccacagtttccagtagtgattgaaaaaacatcacctcctgtgcctgttgaagtagctcctgaagcttctacgtctagtgccagccaagtgattgctcctactcaagtgacagaaatcaatgaatgtactgtgaaccctgatatctgtggagcaggacactgcattaacctaccagtgagatatacctgtatatgctacgagggctacaggttcagtgaacaacagaggaaatgtgtggatattgatgagtgtactcaggtccaacacctctgctcccagggccgctgtgaaaacaccgagggaagtttcttgtgcatttgcccagcaggatttatggccagtgaggagggtactaactgcatagatgttgacgaatgcctgaggccggacgtctgtggggaggggcactgtgtcaatactgtgggggccttccggtgtgaatactgtgacagcgggtaccgcatgactcagagaggccgttgtgaggatattgatgaatgtttgaatccaagcacttgtccagatgagcagtgtgtgaattctcctggatcttaccagtgcgttccctgcacagaaggattccgaggctggaatggacagtgccttgatgtggacgagtgcctggaaccaaacgtctgcgcaaatggtgattgttccaaccttgaaggctcctacatgtgttcatgccacaaaggctatacccggactccggaccacaagcactgtagagatattgatgaatgtcagcaagggaatctatgtgtaaacgggcagtgcaaaaataccgagggctccttcaggtgcacctgtggacaggggtaccagctgtcggcagctaaagaccagtgtgaagacattgatgaatgccagcaccgtcatctctgtgctcatgggcagtgcaggaacactgagggctcttttcaatgtgtgtgtgaccagggttacagagcatctgggcttggagaccactgtgaagatatcaatgaatgcttggaggacaagagtgtttgccagagaggagactgcattaatactgcagggtcctatgattgtacttgtccggatggatttcagctagatgacaataaaacatgtcaagatattaatgaatgtgaacatccagggctctgtggtccgcaaggggagtgcctaaacacagagggttctttccattgtgtctgccagcagggtttctcaatctctgcagatggccgtacgtgtgaagatattgatgaatgtgtaaacaacactgtttgtgacagtcacgggttttgtgacaatacagctggctccttccgctgcctctgttatcagggctttcaagccccacaggatgggcaagggtgtgtggatgtgaatgaatgtgaactgctcagtggggtgtgtggtgaagccttctgtgaaaacgtggaagggtccttcctgtgcgtgtgtgctgatgaaaaccaagagtacagccccatgactgggcagtgccgctcccggacctccacagatttagatgtagatgtagatcaacccaaagaagaaaagaaagaatgctactataatctcaatgacgccagtctctgtgataatgtgttggcccccaatgtcacgaaacaagaatgctgctgtacatcaggcgcgggatggggagataactgcgaaatcttcccctgcccggtcttgggaactgctgagttcactgaaatgtgtcccaaagggaaaggttttgtgcctgctggagaatcatcttctgaagctggtggtgagaactataaagatgcagatgaatgcctactttttggacaagaaatctgcaaaaatggtttctgtttgaacactcggcctgggtatgaatgctactgtaagcaagggacgtactatgatcctgtgaaactgcagtgctttgatatggatgaatgtcaagaccccagtagttgtattgatggccagtgtgttaatacagagggctcttacaactgcttctgtactcaccccatggtcctggatgcgtcagaaaaaagatgtatacgaccggctgagtcaaacgaacaaatagaagaaactgatgtctaccaagatttgtgctgggaacatctgagtgatgaatacgtgtgtagccggcctcttgtgggcaagcagacaacgtacactgagtgctgctgtctgtatggagaggcctggggcatgcagtgtgccctctgccccctgaaggattcagatgactatgctcagctgtgtaacatccccgtgacgggacgccggcagccatatggacgggacgccttggttgacttcagtgaacagtatactccagaagccgatccctacttcatccaagaccgttttctaaatagctttgaggagttacaggctgaggaatgcggcatcctcaatggatgtgaaaatggtcgctgtgtgagggtccaggaaggttacacctgcgattgctttgatgggtatcacttggatacggccaagatgacctgtgtcgatgtaaatgaatgcgatgagttgaacaaccggatgtctctctgcaagaatgccaagtgcattaacaccgatggttcctacaagtgtttgtgtctgccaggctacgtgccttctgacaagccaaactactgcactccgttgaataccgccttgaatttagagaaagacagtgacctggag

SEQ ID NO: 3986 - DNA, 591 bp, Homo Sapiens
caggcggtgcctccatatgcgtcggagaaccagacctgcagggaccaggaaaaggaatactatgagccccagcaccgcatctgctgctcccgctgcccgccaggcacctatgtctcagctaaatgtagccgcatccgggacacagtttgtgccacatgtgccgagaattcctacaacgagcactggaactacctgaccatctgccagctgtgccgcccctgtgacccagtgatgggcctcgaggagattgccccctgcacaagcaaacggaagacccagtgccgctgccagccgggaatgttctgtgctgcctgggccctcgagtgtacacactgcgagctactttctgactgcccgcctggcactgaagccgagctcaaagatgaagttgggaagggtaacaaccactgcgtcccctgcaaggccgggcacttccagaatacctcctcccccagcgcccgctgccagccccacaccaggtgtgagaaccaaggtctggtggaggcagctccaggcactgcccagtccgacacaacctgcaaaaatccattagagccactgcccccagagatgtcaggaaccatgctgatg

SEQ ID NO: 3987 - DNA, 2076 bp, Homo Sapiens
ggccgtaggagaaggagtgttcagtggtgcgccgtatcccaacccgaggccacaaaatgcttccaatggcaaaggaatatgagaaaagtgcgtggccctcctgtcagctgcataaagagagactcccccatccagtgtatccaggccattgcggaaaacagggccgatgctgtgacccttgatggtggtttcatatacgaggcaggcctggccccctacaaactgcgacctgtagcggcggaagtctacgggaccgaaagacagccacgaactcactattatgccgtggctgtggtgaagaagggcggcagctttcagctgaacgaactgcaaggtctgaagtcctgccacacaggccttcgcaggaccgctggatggaatgtccctatagggacacttcgtccattcttgaattggacgggtccacctgagcccattgaggcagctgtggccaggttcttctcagccagctgtgttcccggtgcagataaaggacagttccccaacctgtgtcgcctgtgtgcggggacaggggaaaacaaatgtgccttctcctcccaggaaccgtacttcagctactctggtgccttcaagtgtctgagagacggggctggagacgtggcttttatcagagagagcacagtgtttgaggacctgtcagacgaggctgaaagggacgagtatgagttactctgcccagacaacactcggaagccagtggacaagttcaaagactgccatctggcccgggtcccttctcatgccgttgtggcacgaagtgtgaatggcaaggaggatgccatctggaatcttctccgccaggcacaggaaaagtttggaaaggacaagtcaccgaaattccagctctttggctcccctagtgggcagaaagatctgctgttcaaggactctgccattgggttttcgagggtgcccccgaggatagattctgggctgtaccttggctccggctacttcactgccatccagaacttgaggaaaagtgaggaggaagtggctgcccggcgtgcgcgggtcgtgtggtgtgcggtgggcgagcaggagctgcgcaagtgtaaccagtggagtggcttgagcgaaggcagcgtgacctgctcctcggcctccaccacagaggactgcatcgccctggtgctgaaaggagaagctgatgccatgagtttggatggaggatatgtgtacactgcaggcaaatgtggtttggtgcctgtcctggcagagaactacaaatcccaacaaagcagtgaccctgatcctaactgtgtggatagacctgtggaaggatatcttgctgtggcggtggttaggagatcagacactagccttacctggaactctgtgaaaggcaagaagtcctgccacaccgccgtggacaggactgcaggctggaatatccccatgggcctgctcttcaaccagacgggctcctgcaaatttgatgaatatttcagtcaaagctgtgcccctgggtctgacccgagatctaatctctgtgctctgtgtattggcgacgagcagggtgagaataagtgcgagcccaacagcaacgagagatactacggctacactggggctttccggtgcctggctgagaatgctggagacgttgcatttgtgaaagatgtcactgtcttgcagaacactgatggaaataacaatgaggcatgggctaaggatttgaagctggcagactttgcgctgctgtgcctcgatggcaaacggaagcctgtgactgaggctagaagctgccatcttgccatggccccgaatcatgccgtggtgtctcggatggataaggtggaacgcctgaaacaggtgctgctccaccaacaggctaaatttgggagaaatggatctgactgcccggacaagttttgcttattccagtctgaaaccaaaaaccttctgttcaatgacaacactgagtgtctggccagactccatggcaaaacaacatatgaaaaatatttgggaccacagtatgtcgcaggcattactaatctgaaaaagtgctcaacctcccccctcctggaagcctgtgaattcctcaggaag

SEQ ID NO: 3988 - DNA, 1224 bp, Homo Sapiens
attctctgctctagcccggggtcccaggagacttttctgcggtcctcgcccctgccgctggcaagccccagcccccgggacccgaaagtcagcgccccgcctagtatcttggagccagcctccccgctgaattctccgggcaccgaggggtcttggctgttttctacctgcggggccagcggccggcatgggcccacacagacacaatgtgacggggcgtacgcggggaccagcgtggtggtgaccgtgggggccgccgggcagctgagaggcgtgcagctgtggcgcgtgccgggccctggccagtatctgatctcagcctacggagccgcgggcggcaaaggcgccaagaaccacctgtcgcgggcgcatggcgtcttcgtctcagcaatcttctccctcggtctcggggagtcgctgtacatcctggtggggcagcagggagaggacgcctgtcccggaggtagcccggagagccagctcgtctgcctcggggagtctcgagccgttgaagagcacgcggcgatggatgggagcgaaggggtcccggggtcgcggcgctgggcgggaggtggcgggggtggcgggggcgccacctacgttttccgggtgcgcgctggcgagctggaaccgttgctggtggcggccggaggcggcggtcgggcctacctgaggccgcgggaccgaggccggactcaggcctcccccgagaaactggagaaccgctcggaggcgcccgggagcggcgggagaggcggggcggcaggtggtgggggcggctggacgtcgcgggctccctctccgcaggccggccgctcactgcaggagggggcggagggcggccagggctgctccgaggcttgggcgacccttggctgggccgcggccggcggcttcgggggcggcggcggggcctgcactgcgggcggaggcggtggcggctacagggggggcgacgcttcagagactgacaacctctgggctgatggggaagatggagtatccttcatacaccccagcagcgagctcttcctgcagcctctggcagtcaccgagaaccacggagaggtagagatccgaaggcacctcaactgcagtcactgccctttgagagactgccaatggcaggcagagctccagctggctgaatgcctgtgcccagaaggcatggagctagctgtggataacgtcacctgcatggacctgcgcaagcccccaggccct

SEQ ID NO: 3989 - DNA, 960 bp, Homo Sapiens
cagtactatgattatgattttcccctatcaatttatgggcaatcatcaccaaactgtgcaccagaatgtaactgccctgaaagctacccaagtgccatgtactgtgatgagctgaaattgaaaagtgtaccaatggtgcctcctggaatcaagtatctttaccttaggaataaccagattgaccatattgatgaaaaggcctttgagaatgtaactgatctgcagtggctcattctagatcacaaccttctagaaaactccaagataaaagggagagttttctctaaattgaaacaactgaagaagctgcatataaaccacaacaacctgacagagtctgtgggcccacttcccaaatctctggaggatctgcagcttactcataacaagatcacaaagctgggctcttttgaaggattggtaaacctgaccttcatccatctccagcacaatcggctgaaagaggatgctgtttcagctgcttttaaaggtcttaaatcactcgaataccttgacttgagcttcaatcagatagccagactgccttctggtctccctgtctctcttctaactctctacttagacaacaataagatcagcaacatccctgatgagtatttcaagcgttttaatgcattgcagtatctgcgtttatctcacaacgaactggctgatagtggaatacctggaaattctttcaatgtgtcatccctggttgagctggatctgtcctataacaagcttaaaaacataccaactgtcaatgaaaaccttgaaaactattacctggaggtcaatcaacttgagaagtttgacataaagagcttctgcaagatcctggggccattatcctactccaagatcaagcatttgcgtttggatggcaatcgcatctcagaaaccagtcttccaccggatatgtatgaatgtctacgtgttgctaacgaagtcactcttaat

SEQ ID NO: 3990 - DNA, 234 bp, Homo Sapiens
ctgcgctgccacgtgtgcaccagctccagcaactgcaagcattctgtggtctgcccggccagctctcgcttctgcaagaccacgaacacagtggagcctctgagggggaatctggtgaagaaggactgtgcggagtcgtgcacacccagctacaccctgcaaggccaggtcagcagcggcaccagctccacccagtgctgccaggaggacctgtgcaatgagaagctgcacaac

SEQ ID NO: 3991 - DNA, 243 bp, Homo Sapiens
ctgatgtgcttctcctgcttgaaccagaagagcaatctgtactgcctgaagccgaccatctgctccgaccaggacaactactgcgtgactgtgtctgctagtgccggcattgggaatctcgtgacatttggccacagcctgagcaagacctgttccccggcctgccccatcccagaaggcgtcaatgttggtgtggcttccatgggcatcagctgctgccagagctttctgtgcaatttcagt

SEQ ID NO: 3992 - DNA, 549 bp, Homo Sapiens
aaggttcctgttcccgacatccggacgtgccacttctgcctcgtagaagacccttctgtaggatgcatttcaggctcagagaagtgtaccatcagcagctcatccctgtgcatggtgatcaccatctattatgatgtcaaggttcgcttcatcgttcgaggctgtggacagtacatttcctaccgctgccaagaaaaacgcaacacctactttgcagagtactggtatcaggcccagtgctgtcagtacgattattgcaactcctggtcaagcccccaactccagagctctctgccggagccccatgacaggcccctggccctgcctctgtctgactcccagattcagtggttctaccaggccctgaacctctccctgcccctccccaatttccatgctgggacggagcctgatggcctggaccccatggtcacactgtccctgaacctgggcttgtcttttgctgagctgcgccgcatgtacttgttcctcaatagttcaggacttttggttcttccccaggctggactcttgacacctcacccttcc

SEQ ID NO: 3993 - DNA, 327 bp, Homo Sapiens
aagtttgttcctgtcaattgggaaccccctcaaccacttccattccccaaatacctgcgctgctaccgatgcctcttggagaccaaggagttagggtgccttctgggatctgacatctgcctcaccccagctggcagcagctgcatcactctccacaaaaagaacagcagcggttctgacgtcatggtgagtgactgccgaagtaaggagcagatgagtgattgttcaaatacccgaacttctccggtgtctggcttctggatattctctcaatactgcttcctggatttctgcaatgaccctcaaaacagagggctctatactcct

SEQ ID NO: 3994 - DNA, 243 bp, Homo Sapiens
gacattcgctgtcactcctgctacaaggtccctgtgctgggctgtgtggaccggcagtcctgccgcctggagccaggacagcaatgcctgacaacacatgcataccttggtaagatgtgggttttctccaatctgcgctgtggcacaccagaagagccctgtcaggaggccttcaaccaaaccaaccgtaagctgggtctgacatataacaccacctgctgcaacaaggacaactgcaacagc

SEQ ID NO: 3995 - DNA, 255 bp, Homo Sapiens
aaccgaatgcggtgctacaactgtggtggaagccccagcagttcttgcaaagaggccgtgaccacctgtggcgagggcagaccccagccaggcctggaacagatcaagctacctggaaaccccccagtgaccttgattcaccaacatccagcctgcgtcgcagcccatcattgcaatcaagtggagacagagtcggtgggagacgtgacttatccagcccacagggactgctacctgggagacctgtgcaacagc

SEQ ID NO: 3996 - DNA, 657 bp, Homo Sapiens
gcagacaacatgcaggccatctatgtggccttgggggaggcagtagagctgccatgtccctcaccacctactctacatggggacgaacacctgtcatggttctgcagccctgcagcaggctccttcaccaccctggtagcccaagtccaagtgggcaggccagccccagaccctggaaaaccaggaagggaatccaggctcagactgctggggaactattctttgtggttggagggatccaaagaggaagatgccgggcggtactggtgcgctgtgctaggtcagcaccacaactaccagaactggagggtgtacgacgtcttggtgctcaaaggatcccagttatctgcaagggctgcagatggatccccctgcaatgtcctcctgtgctctgtggtccccagcagacgcatggactctgtgacctggcaggaagggaagggtcccgtgaggggccgtgttcagtccttctggggcagtgaggctgccctgctcttggtgtgtcctggggaggggctttctgagcccaggagccgaagaccaagaatcatccgctgcctcatgactcacaacaaaggggtcagctttagcctggcagcctccatcgatgcttctcctgccctctgtgccccttccacgggctgggacatgccttgg

SEQ ID NO: 3997 - DNA, 270 bp, Homo Sapiens
ctgtggtgccaggactgcaccctgaccaccaactccagccattgcaccccaaagcagtgccagccgtccgacaccgtgtgtgccagtgtccgaatcaccgatcccagcagcagcaggaaggatcactcggtgaacaagatgtgtgcctcctcctgcgacttcgttaagcgacactttttctcagactatctgatggggtttattaactctgggatcttaaaggtcgacgtggactgctgcgagaaggatttgtgcaatggggcggcaggg

SEQ ID NO: 3998 - DNA, 363 bp, Homo Sapiens
gacgccaacctgactgcgagacaacgagatccagaggactcccagcgaacggacgagggtgacaatagagtgtggtgtcatgtttgtgagagagaaaacactttcgagtgccagaacccaaggaggtgcaaatggacagagccatactgcgttatagcggccgtgaaaatatttccacgttttttcatggttgcgaagcagtgctccgctggttgtgcagcgatggagagacccaagccagaggagaagcggtttctcctggaagagcccatgcccttcttttacctcaagtgttgtaaaattcgctactgcaatttagaggggccacctatcaactcatcagtgttcaaagaatatgctggg

SEQ ID NO: 3999 - DNA, 303 bp, Homo Sapiens
tcagcagggtgtgcgactaccccggctaggaatttgtcatgttaccagtgttttaaggtctcaagctggacagaatgcccacctacgtggtgcagtcccctggaccaagtttgtatctccaatgaagtagtggtatcattcaaatggagcgtaagggtgttgctttcaaaaaggtgtgctccgagatgtcctaacgacaatatgaagtttgagtggtcacctgctccgatggttcagggggtgattacaagaagatgttgcagttgggcactgtgcaatagggcattaactccacaggaaggg

SEQ ID NO: 4000 - DNA, 798 bp, Homo Sapiens
tatgaagatggtatttacagtgttattcaaaaaaaggtaacatggtatgaagcattaaacatgtgttctcaaagtggaggtcacttggcaagcgttcacaaccaaaatggccagctctttctggaagatattgtaaaacgtgatggatttccactatgggttgggctctcaagtcatgatggaagtgaatcaagttttgaatggtctgatggtagtacatttgactatatcccatggaaaggccaaacatctcctggaaattgtgttctcttggatccaaaaggaacttggaaacatgaaaaatgcaactctgttaaggatggtgctatttgttataaacctacaaaatctaaaaagctgtcccgtcttacatattcatcaagatgtccagcagcaaaagagaatgggtcacggtggatccagtacaagggtcactgttacaagtctgatcaggcattgcacagtttttcagaggccaaaaaattgtgttcaaaacatgatcactctgcaactatcgtttccataaaagatgaagatgagaataaatttgtgagcagactgatgagggaaaataataacattaccatgagagtttggcttggattatctcaacattctgttgaccagtcttggagttggttagatggatcagaagtgacatttgtcaaatgggaaaataaaagtaagagtggtgttggaagatgtagcatgttgatagcttcaaatgaaacttggaaaaaagttgaatgtgaacatggttttggaagagttgtctgcaaagtgcctctgggccctgat

SEQ ID NO: 4001 - DNA, 618 bp, Homo Sapiens
gtcaccatgaagtctgtgaaggtgtctgagaacttctcctgtaacatcactctaatgtgctccgtgaagggggcagagaaaagtgttctgtacagctggaccccaagggaaccccatgcttctgagtccaatggaggctccattcttaccgtctcccgaacaccatgtgacccagacctgccatacatctgcacagcccagaaccccgtcagccagagaagctccctccctgtccatgttgggcagttctgtacagatccaggagcctccagaggaggaacaacgggggagactgtggtaggggtcctgggagagccagtcaccctgccacttgcactcccagcctgccgggacacagagaaggttgtctggttgtttaacacatccatcattagcaaagagagggaagaagcagcaacggcagatccactcattaaatccagggatccttacaagaacagggtgtgggtctccagccaggactgctccctgaagatcagccagctgaagatagaggacgccggcccctaccatgcctacgtgtgctcagaggcctccagcgtcaccagcatgacacatgtcaccctgctcatctaccgacctgagagaaacacaaag

SEQ ID NO: 4002 - DNA, 333 bp, Homo Sapiens
ctggactgtcacgtctgcgcctataatggagacaactgctttaatccgatgagatgccccgcgatggtagcatattgcatgactacaagaacaagtgccgcagaagcaatctggtgtcaccagtgtacgggatttggcggctgctcccacgggagcaggtgccttagagatagcactcactgcgtaactacggcgactcgtgtcttgagtaatacagaggatcttcctctggttactaagatgtgccacatcggatgtccagatataccgtctcttggtcttggcccttatgtgtcaatcgcctgttgccagacatccttgtgtaaccatgat

SEQ ID NO: 4003 - DNA, 291 bp, Homo Sapiens
ctgcaaatccagtgctaccagtgtgaagaattccagctgaacaacgactgctcctcccccgagttcattgtgaattgcacggtgaacgttcaagacatgtgtcagaaagaagtgatggagcaaagtgccgggatcatgtaccgcaagtcctgtgcatcatcagcggcctgtctcatcgcctctgccgggtaccagtccttctgctccccagggaaactgaactcagtttgcatcagctgctgcaacacccctctttgtaacgggccaaggcccaagaaaaggggaagttct

SEQ ID NO: 4004 - DNA, 243 bp, Homo Sapiens
ctgcgctgctacgtctgtccggagcccacaggagtgtcggactgtgtcaccatcgccacctgcaccaccaacgaaaccatgtgcaagaccacactctactcccgggagatagtgtaccccttccagggggactccacggtgaccaagtcctgtgccagcaagtgtaagccctcggatgtggatggcatcggccagaccctgcccgtgtcctgctgcaatactgagctgtgcaatgtagacggg

SEQ ID NO: 4005 - DNA, 888 bp, Homo Sapiens
ctggagtgctacagctgcgtgcagaaagcagatgacggatgctccccgaacaagatgaagacagtgaagtgcgcgccgggcgtggacgtctgcaccgaggccgtgggggcggtggagaccatccacggacaattctcgctggcagtgcggggttgcggttcgggactccccggcaagaatgaccgcggcctggatcttcacgggcttctggcgttcatccagctgcagcaatgcgctcaggatcgctgcaacgccaagctcaacctcacctcgcgggcgctcgacccggcaggtaatgagagtgcatacccgcccaacggcgtggagtgctacagctgtgtgggcctgagccgggaggcgtgccagggtacatcgccgccggtcgtgagctgctacaacgccagcgatcatgtctacaagggctgcttcgacggcaacgtcaccttgacggcagctaatgtgactgtgtccttgcctgtccggggctgtgtccaggatgaattctgcactcgggatggagtaacaggcccagggttcacgctcagtggctcctgttgccaggggtcccgctgtaactctgacctccgcaacaagacctacttctcccctcgaatcccaccccttgtccggctgccccctccagagcccacgactgtggcctcaaccacatctgtcaccacttctacctcggccccagtgagacccacatccaccaccaaacccatgccagcgccaaccagtcagactccgagacagggagtagaacacgaggcctcccgggatgaggagcccaggttgactggaggcgccgctggccaccaggaccgcagcaattcagggcagtatcctgcaaaaggggggccccagcagccccataataaaggctgt

SEQ ID NO: 4006 - DNA, 510 bp, Homo Sapiens
ctgcctcgtatgtcctgtggggctggatgctataagacccagaaagggactgcaaggggagtcgtgggctttaaaggctgcagctcgtcttcgtcttaccctgcgcaaatctcctaccttgtttccccacccggagtgtccattgcctcctacagtcgcgtctgccggtcttatctctgcaacaacctcaccaatttggagccttttgtgaaactcaaggccagcactcctaagtctatcacatctgcgtcctgtagctgcccgacctgtgtgggcgagcacatgaaggattgcctcccaaattttgtcaccactaattcttgccccttggctgcttctacgtgttacagttccaccttaaaatttcaggcagggtttctcaataccaccttcctcctcatggggtgtgctcgtgaacataaccagcttttagcagattttcatcatattgggagcatcaaagtgactgaggtcctcaacatcttagagaagtctcagattgttggtgca

SEQ ID NO: 4007 - DNA, 600 bp, Homo Sapiens
ctgcagtgctacagctttgagcacacctactttggcccctttgacctcagggccatgaagctgcccagcatctcctgtcctcatgagtgctttgaggctatcctgtctctggacaccgggtatcgcgcgccggtgaccctggtgcggaagggctgctggaccgggcctcctgcgggccagacgcaatcgaacgcggacgcgctgccgccagactactcggtggtgcgcggctgcacaactgacaaatgcaacgcccacctcatgactcatgacgccctccccaacctgagccaagcacccgacccgccgacgctcagcggcgccgagtgctacgcctgtatcggggtccaccaggatgactgcgctatcggcaggtcccgacgagtccagtgtcaccaggaccagaccgcctgcttccagggcaatggcagaatgacagttggcaatttctcagtccctgtgtacatcagaacctgccaccggccctcctgcaccaccgagggcagcaccagcccctggacagccatcgacctccagggctcctgctgtgaggggtacctctgcaacaggaaatccatgacccagcccttcaccagtgct

SEQ ID NO: 4008 - DNA, 384 bp, Homo Sapiens
gctcagtcccgagacttcacagtgaaagacattatctacctccatccttcaaccacaccatatcctggtggatttaaatgtttcacctgtgaaaaggcagcagacaattatgagtgcaaccgatgggctccagacatctactgccctcgagagaccagatactgctacactcagcacacaatggaagtcacaggaaacagtatctcagtcaccaaacgctgtgtcccactggaagagtgcttatccactggctgcagagactccgagcatgaaggccacaaggtctgcacttcttgttgtgaaggaaatatctgtaacttgccactgccccgaaatgaaactgatgccacatttgccacgacgtcacctataaatcagacaaat

SEQ ID NO: 4009 - DNA, 375 bp, Homo Sapiens
aagaacatcaacttctataatgtgaggcctcctctcgaccctacaccatttccaaatagcttcaagtgctttacttgtgaaaacgcaggggataattataactgcaatcgatgggcagaagacaaatggtgtccacaaaatacacagtactgtttgacagttcatcacttcaccagccacggaagaagcacatccatcaccaaaaagtgtgcctccagaagtgaatgtcattttgtcggttgccaccacagccgagattctgaacatacggagtgtaggtcttgctgtgaaggaatgatctgcaatgtagaattacccaccaatcacactaatgcagtgtttgccgtaatgcacgctcagagaacatctggcagc

SEQ ID NO: 4010 - DNA, 588 bp, Homo Sapiens
cttagctgtgtgcagtgcaactcctgggagaagtcttgcgtaaattcaatagcatccgaatgcccttcccatgcaaacactagttgtattagctcatccgcctcctcttctttagagacgcccgtgagactttaccaaaacatgttctgctccgctgaaaattgttccgaagagacccatataacggcattcacggtacacgtttcagctgaagaacacttccacttcgttagtcaatgttgccaggggaaggaatgctctaacacctctgacgcacttgatcctcccctaaagaacgtctcctccaatgccgaatgtcctgcctgctatgaaagtaatggaacaagctgccacggtaaaccttggaagtgttatgaggaggagcaatgcgtcttcctggtggccgagcttaaaaatgatattgaatctaaaagtctggtgttaaagggatgcagcaatgtaagcaacgcgacgtgtcagttcctgtccggggaaaacaagacactgggcggtgtaattttccgtaaatttgaatgcgcaaacgtcaacagcttgacaccaacttctgccccgacgacgagccataat

SEQ ID NO: 4011 - DNA, 969 bp, Homo Sapiens
cagtccctccaggtgaagcccctgcaggtggagcccccggagccggtggtggccgtggccttgggcgcctcgcgccagctcacctgccgcctggcctgcgcggaccgcggggcctcggtgcagtggcggggcctggacaccagcctgggcgcggtgcagtcggacacgggccgcagcgtcctcaccgtgcgcaacgcctcgctgtcggcggccgggacccgcgtgtgcgtgggctcctgcgggggccgcaccttccagcacaccgtgcagctccttgtgtacgccttcccggaccagctgaccgtctccccagcagccctggtgcctggtgacccggaggtggcctgtacggcccacaaagtcacgcccgtggaccccaacgcgctctccttctccctgctcgtcgggggccaggaactggagggggcgcaagccctgggcccggaggtgcaggaggaggaggaggagccccagggggacgaggacgtgctgttcagggtgacagagcgctggcggctgccgcccctggggacccctgtcccgcccgccctctactgccaggccacgatgaggctgcctggcttggagctcagccaccgccaggccatccccgtcctgcacagcccgacctccccggagcctcccgacaccacctccccggagcctcccaacaccacctccccggagtctcccgacaccacctccccggagtctcccgacaccacctcccaggagcctcccgacaccacctcccaggagcctcccgacaccacctcccaggagcctcccgacaccacctccccggagcctcccgacaagacctccccggagcccgccccccagcagggctccacacacacccccaggagcccaggctccaccaggactcgccgccctgagatctcccaggctgggcccacgcagggagaagtgatcccaacaggctcgtccaaacctgcgggtgaccag

SEQ ID NO: 4012 - DNA, 1491 bp, Homo Sapiens
ggtcactggggtgcctggatgccctcgtccatctcggccttcgaaggcacgtgcgtctccatcccctgccgctttgacttcccggatgagctgcggcccgctgtggtgcatggtgtctggtacttcaatagcccctaccccaagaactaccccccggtggtcttcaagtcgcgcacccaagtagtccacgagagcttccagggccgcagccgcctcctgggggacctgggcctgcgaaactgcaccctcctgctcagcaacgtcagccccgagctgggcgggaagtactacttccgtggggacctgggcggctacaaccagtacaccttctcagagcacagtgtcctggatatcgtcaacacccccaacatcgtggtgcccccagaggtggtggcaggcacggaggtggaggtcagctgcatggtgccggacaactgcccagagctgcgccctgagctgagctggctgggccacgaggggctgggggagcccgctgtgctgggccggctgcgggaggacgagggcacctgggtgcaggtgtcactgctgcacttcgtgcccacgagggaggccaacggccacaggctgggctgccaggcctccttccccaacaccaccctgcagttcgagggctacgccagcatggacgtcaagtaccccccggtgattgtggagatgaactcctcggtggaggccatcgagggctcccacgtgagcctgctctgtggggctgacagcaaccccccgccgctgctgacctggatgcgggacgggacagtcctccgggaggcggtggccgagagcctgctcctggagctggaggaggtgacccccgccgaagacggcgtctatgcctgcctggccgagaatgcctatggccaggacaaccgcaccgtggggctcagtgtcatgtatgcaccctggaagccaacagtgaacgggacaatggtggccgtagagggggagacggtctctatcttgtgctccacacagagcaacccggaccctattctcaccatcttcaaggagaagcagatcctgtccacggtcatctacgagagcgagctgcagctggagctgccggccgtgtcacccgaggatgatggagagtactggtgtgtggctgagaaccagtatggccagagggccactgccttcaacctgtctgtggagttcgcccctgtgctcctcctggagtcccactgcgcggcagcccgagacacggtgcagtgcctgtgcgtggtgaagtccaacccggagccgtccgtggcctttgagctgccatcgcgcaatgtgaccgtgaacgagagcgagcgggagttcgtgtactcggagcgcagcggcctcgtgctcaccagcatcctcacgctgcgggggcaggcccaggccccgccccgcgtcatctgcaccgcgaggaacctctatggcgccaagagcctggagctgcccttccagggagcccatcgactgatgtgggccaagatcgggcct

SEQ ID NO: 4013 - DNA, 2586 bp, Homo Sapiens
gccgcggagctcagttacagcttgcgtggcaactggagcatctgcaatgggaacggctcgctggagctgcccggggcggtccctggctgcgtgcacagcgccttgttccagcagggcctgatccaggattcttactacagatttaatgaccttaactacagatgggtctctttggataactggacctatagcaaagaatttaaaatcccctttgaaattagcaaatggcaaaaagtaaatttgattcttgagggagtggatacggtttcaaaaatcctgttcaatgaagtcactattggggaaacagacaatatgttcaatagatatagctttgatattaccaacgtggtcagggacgtgaactccattgagctgcgtttccagtcagcggtgttgtatgcagcacagcagagcaaagctcacactcgctaccaggttcccccagactgccctccacttgtgcagaagggtgaatgccatgtcaactttgttcggaaggagcaatgttcctttagttgggactgggggccttcctttcctacccagggaatctggaaagatgttagaattgaagcctataatatttgtcacctgaactacttcacattttccccaatatatgataagagtgcccaggagtggaatctggaaatagagtctacatttgatgttgtcagctcaaagccagttggtggtcaagtgatcgtagccatccctaagttgcaaacacaacagacatacagcattgaacttcaacctgggaaaaggattgttgagctatttgtgaacattagcaagaatattactgtagaaacttggtggcctcatggacatggaaaccagactgggtacaacatgactgttctttttgaactggatggaggcttaaatattgaaaaatcagctaaggtttattttaggacagtggaacttatagaagagcctataaaagggtctcctggtttgagtttctatttcaaaattaatggatttcccatatttctaaaaggctcaaactggatcccagcagattcattccaggaccgagtaacctctgagttgttacggctccttttacagtctgttgtggatgctaatatgaatactcttcgggtttggggaggaggaatttatgagcaggatgaattctatgaactctgtgatgaactaggaataatggtatggcaggattttatgtttgcctgtgccctttatccaactgatcagggcttcctggattcagtgacagcagaagttgcctaccagatcaagagactgaaatctcatccttctatcatcatatggagtggcaataatgaaaatgaggaggcgctgatgatgaattggtatcatatcagtttcactgaccggccaatctacatcaaggactatgtgacactctatgtgaaaaacatcagagagctcgtactggcaggagacaagagtcgtccttttattacgtccagtcctacaaatggggctgaaactgttgcagaagcctgggtctctcaaaaccctaatagcaattattttggtgatgtacatttttatgactatatcagtgattgctggaactggaaagttttcccaaaagctcgatttgcatctgaatatggatatcagtcctggccgtccttcagtacattagaaaaggtctcgtctacagaggactggtctttcaatagcaagttttcacttcatcgacaacatcacgaaggtggtaacaaacaaatgctttatcaggctggacttcatttcaaactcccccaaagcacagatccattacgcacatttaaagataccatctaccttactcaggtgatgcaggcccagtgtgtcaaaacagaaactgaattctaccgccgtagtcgcagcgagatagtggatcagcaagggcacacgatgggggcactttattggcagttgaatgacatctggcaagctccttcctgggcttctcttgagtacggaggaaagtggaaaatgcttcattactttgctcagaatttctttgctccactgttgccagtaggctttgagaatgaaaacatgttctatatctatggtgtgtcagatcttcactcggattattcgatgacactcagtgtgagagtccatacatggagctccctggagcccgtgtgctctcgtgtgactgaacgttttgtgatgaaaggaggagaggctgtctgcctttatgaggagccagtgtctgaattgctgaggagatgtgggaattgcacacgggaaagctgtgtggtttccttttacctttcagctgaccatgaactcctgagcccgaccaactaccacttcctgtcctcaccgaaggaggccgtggggctctgcaaggcgcagatcactgccatcatctctcagcaaggtgacatatttgtttttgacctggagacctcagctgtcgctccctttgtttggttggatgtaggaagcatcccagggagatttagtgacaatggtttcctcatgactgagaagacacgaactatattattttacccttgggagcccaccagcaagaatgagttggagcaatcttttcatgtgacctccttaacagatatttac

SEQ ID NO: 4014 - DNA, 2127 bp, Homo Sapiens
cacaccgtggagctaaacaatatgtttggccagatccagtcgcctggttatccagactcctatcccagtgattcagaggtgacttggaatatcactgtcccagatgggtttcggatcaagctttacttcatgcacttcaacttggaatcctcctacctttgtgaatatgactatgtgaaggtagaaactgaggaccaggtgctggcaaccttctgtggcagggagaccacagacacagagcagactcccggccaggaggtggtcctctcccctggctccttcatgtccatcactttccggtcagatttctccaatgaggagcgtttcacaggctttgatgcccactacatggctgtggatgtggacgagtgcaaggagagggaggacgaggagctgtcctgtgaccactactgccacaactacattggcggctactactgctcctgccgcttcggctacatcctccacacagacaacaggacctgccgagtggagtgcagtgacaacctcttcactcaaaggactggggtgatcaccagccctgacttcccaaacccttaccccaagagctctgaatgcctgtataccatcgagctggaggagggtttcatggtcaacctgcagtttgaggacatatttgacattgaggaccatcctgaggtgccctgcccctatgactacatcaagatcaaagttggtccaaaagttttggggcctttctgtggagagaaagccccagaacccatcagcacccagagccacagtgtcctgatcctgttccatagtgacaactcgggagagaaccggggctggaggctctcatacagggctgcaggaaatgagtgcccagagctacagcctcctgtccatgggaaaatcgagccctcccaagccaagtatttcttcaaagaccaagtgctcgtcagctgtgacacaggctacaaagtgctgaaggataatgtggagatggacacattccagattgagtgtctgaaggatgggacgtggagtaacaagattcccacctgtaaaattgtagactgtagagccccaggagagctggaacacgggctgatcaccttctctacaaggaacaacctcaccacatacaagtctgagatcaaatactcctgtcaggagccctattacaagatgctcaacaataacacaggtatatatacctgttctgcccaaggagtctggatgaataaagtattggggagaagcctacccacctgccttccagagtgtggtcagccctcccgctccctgccaagcctggtcaagaggatcattgggggccgaaatgctgagcccggcctcttcccgtggcaggccctgatagtggtggaggacacttcgagagtgccaaatgacaagtggtttgggagtggggccctgctctctgcgtcctggatcctcacagcagctcatgtgctgcgctcccagcgtagagacaccacggtgataccagtctccaaggagcatgtcaccgtctacctgggcttgcatgatgtgcgagacaaatcgggggcagtcaacagctcagctgcccgagtggtgctccacccagacttcaacatccaaaactacaaccacgatatagctctggtgcagctgcaggagcctgtgcccctgggaccccacgttatgcctgtctgcctgccaaggcttgagcctgaaggcccggccccccacatgctgggcctggtggccggctggggcatctccaatcccaatgtgacagtggatgagatcatcagcagtggcacacggaccttgtcagatgtcctacagtatgtcaagttacccgtggtgcctcacgctgagtgcaaaactagctatgagtcccgctcgggcaattacagcgtcacggagaacatgttctgtgctggctactacgagggcggcaaagacacgtgccttggagatagcggtggggcctttgtcatctttgatgacttgagccagcgctgggtggtgcaaggcctggtgtcctgggggggacctgaagaatgcggcagcaagcaggtctatggagtctacacaaaggtctccaattacgtggactgggtgtgggagcagatgggcttaccacaaagtgttgtggagccccaggtggaacgg

SEQ ID NO: 4015 - DNA, 1422 bp, Homo Sapiens
agtccagggttggctccacaaagccgtggacatctatgcagaactagaccgacggacttagttttcgttgtagattcttctagaagcgttaggccggttgagttcgaaaaggtgaaagtcttcctttcccaagttatcgagagcttggacgtcggccccaacgcaacgcgtgttggtatggttaattacgccagcacagtcaaacaagagttttctcttagagcccatgtctctaaggctgccttgctgcaagcggttagaaggattcagcctctaagtacaggaaccatgacgggactagccattcagtttgcaataacgaaagcgtttggagacgcagagggagggagaagccgtagcccagacatttcaaaagtggtcattgtggtgacagatggcagaccccaagacagtgtacaagatgtgagtgctagggccagagcctctggagtagagttgtttgcaatcggtgttgggtccgtggacaaagctacgttgagacaaattgcgtcagaaccacaagacgaacatgtggactacgtggagtcttattcagtcattgaaaagctgtctaggaagtttcaagaagccttctgtgtcgtcagtgatttgtgtgcaacgggcgaccatgactgtgaacaagtatgtataagcagccctgggagttacacatgcgcgtgccacgaaggtttcacccttaattccgatggaaaaacttgcaacgtatgctccggagggggtggctcctcagcgaccgacctggtattcttgatcgatggaagtaagtccgtcaggccggagaacttcgagctggtcaagaagttcatttctcaaattgtggacacgctagacgttagcgacaagctggcgcaggtcgggcttgtccagtattcatcttccgtcagacaagagtttcccttgggcagatttcacacgaagaaagacatcaaagcggctgtccgtaacatgagttacatggagaagggcacgatgacgggtgccgccctaaagtacctaatcgacaattcctttacagtttccagtggtgccagacctggtgcccaaaaggttggaattgtatttactgatggtaggagtcaggattacattaacgacgcagccaagaaggctaaggatctaggtttcaagatgttcgcagtgggcgtcggtaatgcagtcgaggacgagttgagagagatcgcatcagaaccggtggcagaacactacttctataccgcggacttcaaaacaattaaccaaatcggaaagaagctgcaaaagaaaatctgtgtagaggaggacccttgcgcctgtgaatcattagtcaagttccaggccaaagtagaaggattactgcaggccctgacgaggaagctggaagcggtaagtaagagactagcgattttagagaacacagtggtt

SEQ ID NO: 4016 - DNA, 2742 bp, Homo Sapiens
agggagcggtcacgtgggaggtccatctctaggggcagacacgctcggacccacccgcagacggcccttctggagagttcctgtgagaacaagcgggcagacctggttttcatcattgacagctctcgcagtgtcaacacccatgactatgcaaaggtcaaggagttcatcgtggacatcttgcaattcttggacattggtcctgatgtcacccgagtgggcctgctccaatatggcagcactgtcaagaatgagttctccctcaagaccttcaagaggaagtccgaggtggagcgtgctgtcaagaggatgcggcatctgtccacgggcaccatgaccgggctggccatccagtatgccctgaacatcgcattctcagaagcagagggggcccggcccctgagggagaatgtgccacgggtcataatgatcgtgacagatgggagacctcaggactccgtggccgaggtggctgctaaggcacgggacacgggcatcctaatctttgccattggtgtgggccaggtagacttcaacaccttgaagtccattgggagtgagccccatgaggaccatgtcttccttgtggccaatttcagccagattgagacgctgacctccgtgttccagaagaagttgtgcacggcccacatgtgcagcaccctggagcataactgtgcccacttctgcatcaacatccctggctcatacgtctgcaggtgcaaacaaggctacattctcaactcggatcagacgacttgcagaatccaggatctgtgtgccatggaggaccacaactgtgagcagctctgtgtgaatgtgccgggctccttcgtctgccagtgctacagtggctacgccctggctgaggatgggaagaggtgtgtggctgtggactactgtgcctcagaaaaccacggatgtgaacatgagtgtgtaaatgctgatggctcctacctttgccagtgccatgaaggatttgctcttaacccagatgaaaaaacgtgcacaaagatagactactgtgcctcatctaatcatggatgtcagcatgagtgtgttaacacagatgattcctattcctgccactgcctgaaaggctttaccctgaatccagataagaaaacctgcagaaggatcaactactgtgcactgaacaaaccgggctgtgagcatgagtgcgtcaacatggaggagagctactactgccgctgccaccgtggctacactctggaccccaatggcaaaacctgcagccgagtggaccactgtgcacagcaggaccatggctgtgagcagctgtgtctgaacacggaggattccttcgtctgccagtgctcagaaggcttcctcatcaacgaggacctcaagacctgctcccgggtggattactgcctgctgagtgaccatggttgtgaatactcctgtgtcaacatggacagatcctttgcctgtcagtgtcctgagggacacgtgctccgcagcgatgggaagacgtgtgcaaaattggactcttgtgctctgggggaccacggttgtgaacattcgtgtgtaagcagtgaagattcgtttgtgtgccagtgctttgaaggttatatactccgtgaagatggaaaaacctgcagaaggaaagatgtctgccaagctatagaccatggctgtgaacacatttgtgtgaacagtgacgactcatacacgtgcgagtgcttggagggattccggctcgctgaggatgggaaacgctgccgaaggaaggatgtctgcaaatcaacccaccatggctgcgaacacatttgtgttaataatgggaattcctacatctgcaaatgctcagagggatttgttctagctgaggacggaagacggtgcaagaaatgcactgaaggcccaattgacctggtctttgtgatcgatggatccaagagtcttggagaagagaattttgaggtcgtgaagcagtttgtcactggaattatagattccttgacaatttcccccaaagccgctcgagtggggctgctccagtattccacacaggtccacacagagttcaccctgagaaacttcaactcagccaaagacatgaaaaaagccgtggcccacatgaaatacatgggaaagggctctatgactgggctggccctgaaacacatgtttgagagaagttttacccaaggagaaggggccaggcccctttccacaagggtgcccagagcagccattgtgttcaccgacggacgggctcaggatgacgtctccgagtgggccagtaaagccaaggccaatggtatcactatgtatgctgttggggtaggaaaagccattgaggaggaactacaagagattgcctctgagcccacaaacaagcatctcttctatgccgaagacttcagcacaatggatgagataagtgaaaaactcaagaaaggcatctgtgaagctctagaagactccgatggaagacaggactctccagcaggggaactgccaaaaacggtccaacagccaacagtgcaacacagatatctgtttgaagaagacaatcttttacggtctacacaaaagctttcccattcaacaaaaccttcaggaagccctttggaagaaaaacacgatcaatgcaaatgtgaaaaccttataatgttccagaaccttgcaaacgaagaagtaagaaaattaacacagcgcttagaagaaatgacacagagaatggaagccctggaaaatcgcctgagatacaga

SEQ ID NO: 4017 - DNA, 1374 bp, Homo Sapiens
gaccccgtggcccgcccgggcttccggaggctggagacccgaggtcccgggggcagccctggacgccgcccctctcctgcggctcccgacggcgcgcccgcttccgggaccagcgagcctggccgcgcccgcggtgcaggtgtttgcaagagcagacccttggacctggtgtttatcattgatagttctcgtagcgtacggcccctggaattcaccaaagtgaaaacttttgtctcccggataatcgacactctggacattgggccagccgacacgcgggtggcagtggtgaactatgctagcactgtgaagatcgagttccaactccaggcctacacagataagcagtccctgaagcaggccgtgggtcgaatcacacccttgtcaacaggcaccatgtcaggcctagccatccagacagcaatggacgaagccttcacagtggaggcaggggctcgagagccctcttctaacatccctaaggtggccatcattgttacagatgggaggccccaggaccaggtgaatgaggtggcggctcgggcccaagcatctggtattgagctctatgctgtgggcgtggaccgggcagacatggcgtccctcaagatgatggccagtgagcccctagaggagcatgttttctacgtggagacctatggggtcattgagaaactttcctctagattccaggaaaccttctgtgcgctggacccctgtgtgcttggaacacaccagtgccagcacgtctgcatcagtgatggggaaggcaagcaccactgtgagtgtagccaaggatacaccttgaatgccgacaagaaaacgtgttcagctcttgataggtgtgctcttaacacccacggatgtgagcacatctgtgtgaatgacagaagtggctcttatcattgtgagtgctatgaaggttataccttgaatgaagacaggaaaacttgttcagctcaagataaatgtgctttgggtacccatgggtgtcagcacatttgtgtgaatgacagaacagggtcccatcattgtgaatgctatgagggctacactctgaatgcagataaaaaaacatgttcagtccgtgacaagtgtgccctaggctctcatggttgccagcacatttgtgtgagtgatggggccgcatcctaccactgtgattgctatcctggctacaccttaaatgaggacaagaaaacatgttcagccactgaggaagcacgaagacttgtttccactgaagatgcttgtggatgtgaagctacactggcattccaggacaaggtcagctcgtatcttcaaagactgaacactaaacttgatgacattttggagaagttgaaaataaatgaatatggacaaatacatcgt

SEQ ID NO: 4018 - DNA, 1689 bp, Homo Sapiens
acccagctccagttgacaggtcccaggtgtcacactgggcccctggatctggtgttcgtgattgacagctcccgcagcgtgcgccctttcgagttcgagaccatgcggcagttcctcatgggcctcctccgaggcctgaacgtgggtcccaacgccacgcgcgttggcgtgatccagtattcgagtcaagtgcagagcgtcttccctctccgcgcgttctctcgccgcgaggacatggagcgcgccatccgcgacctggtgcctctggcgcaaggcaccatgacgggactggcgatccagtacgccatgaacgtggccttcagtgtggccgagggcgcgcgaccgccagaggagcgcgtgccgcgtgtcgctgtcatcgtgacagacgggcggccccaggaccgcgtggccgaggtggcggcacaggcgcgcgccagcggcattgaaatttacgcggtgggggtgcagcgcgcggacgtgggctccctgcgcgccatggcatcgcccccgctagacgagcacgtcttcctcgtagagtccttcgacctcatccaggagttcggcctgcagttccagagccggctgtgtgccattgatctgtgtgctgaagggacccatggatgtgagcaccactgcgtcaattccccaggctcctatttctgtcactgccaagttggctttgtactccagcaggaccagaggagctgcagggccattgactactgcagctttgggaaccatagctgtcagcatgagtgtgttagcacccctggtgggccacggtgccactgcagagagggccatgacttgcagcctgatgggaggagctgtcaggtccgggacctttgcaatggcgtggaccatggctgtgagttccagtgtgtgagcgagggcctctcctaccgctgcctgtgccccgaggggcggcaacttcaggcagatggcaagagctgcaaccggtgccgggaaggccacgtggaccttgttctgctggttgatggctccaagagcgtgcgtccacaaaacttcgagctagtgaagcgcttcgtgaaccagattgtggacttcctagatgtgtcccccgagggcacgcgggtggggctggtgcagttctcgagccgcgtgcgcaccgagttccctctgggtcgctacggcaccgcagccgaggtgaagcaggcggtcctggccgtggagtacatggaacgcggcaccatgacagggctggcgttgcggcacatggtggagcacagcttctccgaggcgcagggtgcacggccccgtgcccttaacgtgcctcgtgttggcctggtcttcacggatggccgctcccaggatgacatctcggtgtgggcagcgcgcgccaaggaggaaggcatcgtcatgtacgccgtgggcgtgggcaaggcggtggaggcggagctgcgcgagatcgcctcggagccagcggaactgcacgtgtcctatgccccggacttcggcaccatgacgcacctgctggagaacctcagaggcagcatctgtccagaggagggcatcagcgcagggacagagcttcggagcccatgcgaatgcgaaagcctcgtggagttccagggccgcacgctgggggcgctcgagagcctgacgctgaacctggcccagctgacggcgcgcctggaggatctggagaaccagctggccaaccagaag

SEQ ID NO: 4019 - DNA, 684 bp, Homo Sapiens
gaaactgtgacctgtgaggatgcccaaaagacctgccctgcagtgattgcctgtagctctccaggcatcaacggcttcccaggcaaagatgggcgtgatggcaccaagggagaaaagggggaaccaggccaagggctcagaggcttacagggcccccctggaaagttggggcctccaggaaatccagggccttctgggtcaccaggaccaaagggccaaaaaggagaccctggaaaaagtccggatggtgatagtagcctggctgcctcagaaagaaaagctctgcaaacagaaatggcacgtatcaaaaagtggctcaccttctctctgggcaaacaagttgggaacaagttcttcctgaccaatggtgaaataatgacctttgaaaaagtgaaggccttgtgtgtcaagttccaggcctctgtggccacccccaggaatgctgcagagaatggagccattcagaatctcatcaaggaggaagccttcctgggcatcactgatgagaagacagaagggcagtttgtggatctgacaggaaatagactgacctacacaaactggaacgagggtgaacccaacaatgctggttctgatgaagattgtgtattgctactgaaaaatggccagtggaatgacgtcccctgctccacctcccatctggccgtctgtgagttccctatc

SEQ ID NO: 4020 - DNA, 1608 bp, Homo Sapiens
gtgcccggagaggctgagcagcctgcgcctgagctggtggaggtggaagtgggcagcacagcccttctgaagtgcggcctctcccagtcccaaggcaacctcagccatgtcgactggttttctgtccacaaggagaagcggacgctcatcttccgtgtgcgccagggccagggccagagcgaacctggggagtacgagcagcggctcagcctccaggacagaggggctactctggccctgactcaagtcaccccccaagacgagcgcatcttcttgtgccagggcaagcgccctcggtcccaggagtaccgcatccagctccgcgtctacaaagctccggaggagccaaacatccaggtcaaccccctgggcatccctgtgaacagtaaggagcctgaggaggtcgctacctgtgtagggaggaacgggtaccccattcctcaagtcatctggtacaagaatggccggcctctgaaggaggagaagaaccgggtccacattcagtcgtcccagactgtggagtcgagtggtttgtacaccttgcagagtattctgaaggcacagctggttaaagaagacaaagatgcccagttttactgtgagctcaactaccggctgcccagtgggaaccacatgaaggagtccagggaagtcaccgtccctgttttctacccgacagaaaaagtgtggctggaagtggagcccgtgggaatgctgaaggaaggggaccgcgtggaaatcaggtgtttggctgatggcaaccctccaccacacttcagcatcagcaagcagaaccccagcaccagggaggcagaggaagagacaaccaacgacaacggggtcctggtgctggagcctgcccggaaggaacacagtgggcgctatgaatgtcagggcctggacttggacaccatgatatcgctgctgagtgaaccacaggaactactggtgaactatgtgtctgacgtccgagtgagtcccgcagcccctgagagacaggaaggcagcagcctcaccctgacctgtgaggcagagagtagccaggacctcgagttccagtggctgagagaagagacaggccaggtgctggaaagggggcctgtgcttcagttgcatgacctgaaacgggaggcaggaggcggctatcgctgcgtggcgtctgtgcccagcatacccggcctgaaccgcacacagctggtcaacgtggccatttttggccccccttggatggcattcaaggagaggaaggtgtgggtgaaagagaatatggtgttgaatctgtcttgtgaagcgtcagggcacccccggcccaccatctcctggaacgtcaacggcacggcaagtgaacaagaccaagatccacagcgagtcctgagcaccctgaatgtcctcgtgaccccggagctgttggagacaggtgttgaatgcacggcctccaacgacctgggcaaaaacaccagcatcctcttcctggagctggtcaatttaaccaccctcacaccagactccaacacaaccactggcctcagcacttccactgccagtcctcataccagagccaacagcacctccacagagagaaagctgccggagccggagagccggggc

SEQ ID NO: 4021 - DNA, 882 bp, Homo Sapiens
tgtgaggagccaccaacatttgaagctatggagctcattggtaaaccaaaaccctactatgagattggtgaacgagtagattataagtgtaaaaaaggatacttctatatacctcctcttgccacccatactatttgtgatcggaatcatacatggctacctgtctcagatgacgcctgttatagagaaacatgtccatatatacgggatcctttaaatggccaagcagtccctgcaaatgggacttacgagtttggttatcagatgcactttatttgtaatgagggttattacttaattggtgaagaaattctatattgtgaacttaaaggatcagtagcaatttggagcggtaagcccccaatatgtgaaaaggttttgtgtacaccacctccaaaaataaaaaatggaaaacacacctttagtgaagtagaagtatttgagtatcttgatgcagtaacttatagttgtgatcctgcacctggaccagatccattttcacttattggagagagcacgatttattgtggtgacaattcagtgtggagtcgtgctgctccagagtgtaaagtggtcaaatgtcgatttccagtagtcgaaaatggaaaacagatatcaggatttggaaaaaaattttactacaaagcaacagttatgtttgaatgcgataagggtttttacctcgatggcagcgacacaattgtctgtgacagtaacagtacttgggatcccccagttccaaagtgtcttaaagtgtcgacttcttccactacaaaatctccagcgtccagtgcctcaggtcctaggcctacttacaagcctccagtctcaaattatccaggatatcctaaacctgaggaaggaatacttgacagtttggat

SEQ ID NO: 4022 - DNA, 2742 bp, Homo Sapiens
caaggagtctacgctccagcccaggcgcagatcgtgcatgcgggccaggcatgtgtggtgaaagaggacaatatcagcgagcgtgtctacaccatccgggagggggacaccctcatgctgcagtgccttgtaacagggcaccctcgaccccaggtacggtggaccaagacggcaggtagcgcctcggacaagttccaggagacatcggtgttcaacgagacgctgcgcatcgagcgtattgcacgcacgcagggcggccgctactactgcaaggctgagaacggcgtgggggtgccggccatcaagtccatccgcgtggacgtgcagtacctggatgagccaatgctgacggtgcaccagacggtgagcgatgtgcgaggcaacttctaccaggagaagacggtgttcctgcgctgtactgtcaactccaacccgcctgcccgcttcatctggaagcggggttccgataccctatcccacagccaggacaatggggttgacatctatgagcccctctacactcagggggagaccaaggtcctgaagctgaagaacctgcggccccaggactatgccagctacacctgccaggtgtctgtgcgtaacgtgtgcggcatcccagacaaggccatcaccttccggctcaccaacaccacggcaccaccagccctgaagctgtctgtgaacgaaactctggtggtgaaccctggggagaatgtgacggtgcagtgtctgctgacaggcggtgatcccctcccccagctgcagtggtcccatgggcctggcccactgcccctgggtgctctggcccagggtggcaccctcagcatcccttcagtgcaggcccgggactctggctactacaactgcacagccaccaacaatgtgggcaaccctgccaagaagactgtcaacctgctggtgcgatccatgaagaacgctacattccagatcactcctgacgtgatcaaagagagtgagaacatccagctgggccaggacctgaagctatcgtgccacgtggatgcagtgccccaggagaaggtgacctaccagtggttcaagaatggcaagccggcacgcatgtccaagcggctgctggtgacccgcaatgatcctgagctgcccgcagtcaccagcagcctagagctcattgacctgcacttcagtgactatggcacctacctgtgcatggcttctttcccaggggcacccgtgcccgacctcagcgtcgaggtcaacatctcctctgagacagtgccgcccaccatcagtgtgcccaagggtagggccgtggtgaccgtgcgcgagggatcgcctgccgagctgcaatgcgaggtgcggggcaagccgcggccgccagtgctctggtcccgcgtggacaaggaggctgcactgctgccctcggggctgcccctggaggagactccggacgggaagctgcggctggagcgagtgagccgagacatgagcgggacctaccgctgccagacggcccgctataatggcttcaacgtgcgcccccgtgaggcccaggtgcagctgaacgtgcagttcccgccggaggtggagcccagttcccaggacgtgcgccaggcgctgggccggcccgtgctcctgcgctgctcgctgctgcgaggcagcccccagcgcatcgcctcggctgtgtggcgtttcaaagggcagctgctgccgccgccgcctgttgttcccgccgccgccgaggcgccggatcacgcggagctgcgcctcgacgccgtaactcgcgacagcagcggcagctacgagtgcagcgtctccaacgatgtgggctcggctgcctgcctcttccaggtctccgccaaagcctacagcccggagttttacttcgacacccccaaccccacccgcagccacaagctgtccaagaactactcctacgtgctgcagtggactcagagggagcccgacgctgtcgaccctgtgctcaactacagactcagcatccgccagttgaaccagcacaatgcggtggtcaaggccatcccggtccggcgtgtggagaaggggcagctgctggagtacatcctgaccgatctccgtgtgccccacagctatgaggtccgcctcacaccctataccaccttcggggctggtgacatggcctcccgcatcatccactacacagagcccatcaactctccgaacctttcagacaacacctgccactttgaggatgagaagatctgtggctatacccaggacctgacagacaactttgactggacgcggcagaatgccctcacccagaaccccaaacgctcccccaacactggtccccccaccgacataagtggcacccctgagggctactacatgttcatcgagacatcgaggcctcgggagctgggggaccgtgcaaggttagtgagtcccctctacaatgccagcgccaagttctactgtgtctccttcttctaccacatgtacgggaaacacatcggctccctcaacctcctggtgcggtcccggaacaaaggggctctggacacgcacgcctggtctctcagtggcaataagggcaatgtgtggcagcaggcccatgtgcccatcagccccagtgggcccttccagattatttttgagggggttcgaggcccgggctacctgggggatattgccatagatgacgtcacactgaagaagggggagtgtccccggaagcagacggatcccaataaagtggtggtgatgccgggcagt

SEQ ID NO: 4023 - DNA, 909 bp, Homo Sapiens
ccagtagtaactgttcatcaaagtataggtgaagctaaagaacaattttactatgagagaacagtgttcctccggtgtgttgccaattccaatcctcctgttcggtatagctggagacgtggccaggaggtcttgctgcaaggatctgataaaggagttgagatttatgaaccattctttacccagggtgaaacaaagatcttaaaactaaagaatcttcgacctcaggactatgctaattatagctgcattgcttcagtgaggaatgtatgtaatattcctgataagatggtgtcgtttagactgtccaataaaacagcatcaccgtcaattaaactcttggtggatgatcctatagttgtaaatcctggagaggccataacattagtatgtgttacaacaggaggagagcctgcaccttctctcacctgggtcaggtcctttgggactctgcctgaaaagactgttttgaatggaggaactttgaccatacctgccatcacctcagatgatgctggtacttacagctgcattgccaataataatgtgggaaaccctgcaaaaaagtccaccaacatcattgtgagagcattaaaaaaaggacgattttggatcacaccagatccttatcacaaagatgacaacatccagattggccgtgaggtgaaaatatcttgccaagtagaagctgttccttctgaggagctaacatttagttggtttaaaaatggtcgtccattaagaagttctgagcggatggtcattacacagactgatcctgatgtctctccgggaacaacaaacttggacatcattgatttaaaattcacggattttgggacgtacacatgtgtagcatctctgaagggaggaggaatatctgatatcagtatcgatgttaatatatcc

SEQ ID NO: 4024 - DNA, 1626 bp, Homo Sapiens
ctgaatcttgaagaccctaatgtgtgtagccactgggaaagctactcagtgactgtgcaagagtcatacccacatccctttgatcaaatttactacacgagctgcactgacattctaaactggtttaaatgcacgcggcacagagtcagctatcggacagcctatcgacatggggagaagactatgtataggcgcaagtctcagtgttgtcctggattttatgaaagcggggaaatgtgtgtcccccactgtgctgataaatgtgtccatggtcgctgtattgctccaaacacctgtcagtgtgagcctggctggggagggaccaactgctccagtgcctgcgatggtgatcactggggtccccactgcaccagccggtgccagtgcaaaaatggggctctgtgcaaccccatcaccggggcttgccactgtgctgcgggcttccggggctggcgctgcgaggaccgctgtgagcagggcacctatggtaacgactgtcatcagagatgccagtgccagaatggagccacctgcgaccacgtcacgggggaatgccgctgcccaccaggatacaccggagccttctgtgaggatctttgtcctcctggtaaacatggtccacagtgtgagcagagatgcccttgtcaaaatggaggagtgtgtcatcacgtcactggagaatgctcttgcccttctggctggatgggcacagtgtgtggtcagccttgccccgagggtcgctttggaaagaactgttcccaagaatgccagtgccataatggagggacgtgtgatgctgccacaggccaatgtcattgcagtccaggatacacaggggaacggtgccaggatgagtgtcctgttgggacctatggcgttctctgtgctgagacctgccagtgtgtcaacggagggaagtgttaccacgtgagcggcgcatgcctctgtgaagcaggctttgctggcgagcgctgcgaagcacgcctgtgtcctgaggggctctacggcatcaaatgtgacaaacggtgtccctgccacttggaaaacactcatagctgtcaccccatgtctggagagtgtgcctgcaagccgggctggtcaggactctactgtaatgagacatgttctcctggattctacggggaagcttgccagcagatctgcagctgccaaaatggggcagactgtgacagtgtgactggaaagtgcacctgtgccccaggattcaaaggaattgactgctctaccccatgccctctgggaacctatgggataaactgttcctctcgctgtggctgtaaaaatgatgcagtctgctctcctgtggacgggtcttgtacttgcaaggcaggctggcacggggtggactgctccatcagatgtcccagtggcacatggggctttggctgtaacttaacatgccagtgcctcaacgggggagcctgcaacaccctggacgggacctgcacgtgtgcacctggatggcgcggggagaaatgcgaacttccctgccaggatggcacgtacgggctgaactgtgctgagcgctgcgactgcagccacgcagatggctgccaccctaccacgggccattgccgctgcctccccggatggtcaggattgttt

SEQ ID NO: 4025 - DNA, 2487 bp, Homo Sapiens
ctgaaccccgaggaccccaacgtgtgcagccactgggagagctatgctgtgactgtccaggaatcgtatgcacaccccttcgatcagatctattacacacgatgcacagacatcctcaactggttcaagtgcaccaggcaccggatcagttataagacggcgtatcggagaggcctccggaccatgtaccggcggaggtcccagtgctgccctggctactatgagaacggagacttctgcatacccctgtgtacggaggagtgtgtgcacggccgctgcgtttccccggacacctgccactgcgagcctggctggggagggcccgactgctccagcggctgcgacagcgaccactgggggccccactgcagcaaccggtgccagtgccagaacggcgccctgtgtaaccccatcacaggcgcctgcgtgtgcgccgccggcttccgtggatggcgctgcgaggagctctgcgcgcctggcacccacggcaagggatgccagctgccgtgccagtgccgacacggtgccagctgcgacccccgcgccggcgagtgcctctgcgcacctggctacaccggcgtctactgcgaggagctgtgccctcctgggagccatggagctcactgtgagctgcgctgcccctgtcagaatgggggcacctgccaccacatcactggcgagtgtgcctgccccccaggctggacgggagcagtgtgtgcccagccctgcccaccagggacatttggccagaactgcagccaggattgtccttgccaccatggagggcagtgtgaccacgtgactggacagtgccactgtacagctggatacatgggggacaggtgccaagaggagtgccccttcgggtccttcggcttccagtgctcacagcgctgtgactgccacaatggggggcagtgttcacccaccacgggtgcctgcgagtgtgagcctggctacaagggcccacgctgccaggagcgactgtgcccggagggcctgcatggcccaggctgcaccctgccctgcccctgtgacgctgacaacaccatcagctgccacccagtaactggagcttgtacctgccagccaggctggtctggtcaccactgcaatgaatcctgccctgttggctactatggcgatggctgccagctgccttgcacctgtcagaatggcgccgactgccacagcatcactgggggctgcacttgtgctccgggcttcatgggagaggtctgtgccgtttcctgtgcagcagggacctatggccccaactgctcgtccatctgtagctgtaacaatggtggcacctgctccccagtagatggctcctgtacctgcaaggaagggtggcagggcctggactgcaccctgccatgtcccagtgggacgtggggcctgaactgcaacgagagctgcacctgtgccaatggggcagcctgcagccccatagacggctcctgctcctgcactcctggctggctgggagacacctgtgagctgccttgcccggatggcacatttgggctgaactgcagtgaacactgtgactgcagccatgctgatggatgtgaccccgtcacaggccactgctgctgcctggccggatggacaggcatccgctgtgacagcacgtgtccacctggccgctggggccccaactgctctgtctcctgcagctgtgagaatggaggctcctgctccccagaggatgggagctgcgagtgtgcccctggcttccgaggacccttatgccagagaatctgcccccctgggttctatggccacggctgcgcccagccatgccccctctgcgtgcacagcagcaggccctgccaccacatcagcggcatctgtgagtgcctcccaggattctctggagctctctgcaaccaagtgtgtgctggaggatactttgggcaggactgtgcccagctctgctcctgtgccaacaacgggacctgcagccctatcgatggctcctgccagtgctttcctggatggattggcaaggactgctcacaggcttgcccacccgggttctggggccccgcctgcttccacgcatgcagctgccacaacggggcgagctgcagcgccgaggacggggcctgccactgcacccctggctggactggactcttctgcacacagcgctgcccagcagcattttttgggaaggactgtgggcgcgtatgccagtgtcagaatggcgccagctgtgaccacatcagtggcaagtgcacctgccgcacaggcttcaccgggcaacactgtgagcagagatgtgccccaggaacctttggctatgggtgtcagcagctatgtgagtgcatgaacaactccacctgtgaccatgtcaccggcacctgttactgcagccctggcttcaaaggaatcaggtgtgaccaagctgccctcatgatggaggagctgaatccctacaccaagatcagcccagcactgggtgcagagcggcactcg

SEQ ID NO: 4026 - DNA, 1587 bp, Homo Sapiens
gccgtcgcctcagccgcctcggcggggaatgtcaccggtggcggcggggccgcggggcaggtggacgcgtcgccgggccccgggttgcggggcgagcccagccaccccttccctagggcgacggctcccacggcccaggccccgaggaccgggcccccgcgcgccaccgtccaccgacccctggctgcgacttctccagcccagtccccggagaccacccctctttgggcgactgctggaccctcttccaccacctttcaggcgccgctcggcccctcgccgaccacccctccggcggcggaacgcacttcgaccacctctcaggcgccgaccagacccgcgccgaccaccctttcgacgaccactggcccggcgccgaccacccctgtagcgaccaccgtaccggcgcccacgactccccggaccccgacccccgatctccccagcagcagcaacagcagcgtcctccccaccccacctgccaccgaggccccctcttcgcctcctccagggcatcagtggcctgtggcaaagatgccccaaaagtatctaggaaaatatgcctgtgagagtaacctgaaaagcaagtacttgcctcttacacagccagtcatgaatcttagagtctcagaagctgttaaaacggagtatgtatgtaactgctctgtggttggaagcctgaatgtgaatcgctgcaaccagaccacagggcagtgtgagtgtcggccaggttatcaggggcttcactgtgaaacctgcaaagagggcttttacctaaattacacttctgggctctgtcagccatgtgactgtagtccacatggagctctcagcataccgtgcaacagttctgggaaatgccagtgcaaagtgggtgtcattggctctatatgtgaccgatgccaagatggatattatggctttagtaagaatggctgcttgccctgccaatgcaataatcggtctgccagttgcgatgccctcacaggtgcttgtttaaactgccaggaaaatagcaaaggaaatcactgtgaagaatgtaaagaaggattttatcagagtcctgatgccactaaagaatgtcttcgctgcccttgttcagcagtgacatctacaggcagctgctctataaaatcgagtgaattggaacctgaatgtgaccagtgtaaagatggttacataggcccgaactgcaataaatgtgaaaatggctattacaattttgacagcatctgtagaaagtgccaatgtcacggccatgtggacccagttaaaactccaaagatttgtaagcccgagagtggtgagtgcatcaactgcctccataacaccactgggttttggtgtgagaactgcctagaaggttatgttcacgacctcgagggaaattgcatcaagaaagaagttattcttccaacacctgaaggttctaccattttggtttccaatgcctctttgaccacatcagtgcccacccctgttataaatagtacttttacccctacaaccctgcagactatcttttcagtaagcacttctgaaaacagcacttcagctttagctgatgtatcatggacccaatttaac

SEQ ID NO: 4027 - DNA, 1941 bp, Homo Sapiens
aatggcctgagagacccaaacaccaggtggacgttccccattccttacatcttggctgataatttggggctgaatgctaaaggagccattctgtatgcctttgagatgttccgtctcaagtcctgtgtggatttcaagccctatgaaggagagagctcatatatcatatttcaacagtttgatgggtgctggtctgaggttggtgaccaacatgtgggacagaacatttccattggccaaggatgtgcctataaggccatcatagaacacgagatcctgcatgctttgggattttaccacgagcagtcaaggacggaccgggatgattatgtgaacatctggtgggaccaaattctttcaggttaccagcacaactttgacacctatgatgatagcttaatcacagacctcaatacaccctatgattatgagtctttgatgcactaccagcctttctcatttaacaagaatgcaagtgttcccaccatcacagccaagatccctgagtttaactccattatcggacaacgcctggatttcagtgccattgatttagagaggctgaaccgaatgtacaattgcaccacaactcacactcttttggaccactgtacttttgagaaggcaaacatctgtggaatgattcagggcaccagagatgacactgactgggcccatcaggacagtgctcaggctggagaagtggatcacaccttgttgggacaatgcacaggtgccggctacttcatgcagttcagcaccagctcggggtccgcggaagaggcagccctactggagtctcggattctttacccaaagaggaagcagcagtgcctgcaatttttctataaaatgacgggaagtccttcagacagactcgttgtctgggtcaggagggatgacagcacaggcaatgttcgcaagttggtgaaggtgcagacttttcaaggagatgatgaccacaattggaaaattgcccatgtggtgctcaaagaggaacagaagtttcgctaccttttccagggcacaaaaggcgaccctcagaactcaactgggggaatttacctagatgacatcactctgacagaaaccccctgccccacaggggtctggacagtccggaatttctcccaagtccttgagaacaccagcaaaggggacaagcttcagagccctcgattctacaattcggagggatatggttttgggttaactttatacccaaatagcggagaaagctctggttacttgagacttgcttttcatgtgtgcagtggggagaacgatgctatcctggagtggccggtagaaaacagacaggtgataattaccatccttgaccaggagcctgatgtccggaacaggatgtcctcaagcatggtgttcactacctcgaagtcgcacacatctccagcgataaatgacactgtcatctgggacaggccgtccagggtgggaacctatcatacagactgtaattgttttagaagcatcgacttgggctggagtggtttcatttcccaccaaatgctgaaaaggaggagtttcctgaaaaatgatgacctcatcatatttgtggactttgaagatatcacccacctcagccagactgaagttcccactaaaggcaaaagactgagcccccaaggcctcattctccaaggccaggagcagcaggtctccgaagaaggttcgggaaaggccatgttagaggaagccctacctgtcagcctgagccaggggcagcccagccgacagaagcggtcggtggagaacacaggccccctggaggaccataactggccacagtacttcagagacccatgtgacccaaacccttgccaaaatgacggcatctgtgtgaacgtgaaggggatggcgagctgcaggtgcatctctggacatgctttcttctacacgggggagcgctgtcaggccgtg

SEQ ID NO: 4028 - DNA, 1773 bp, Homo Sapiens
aattccatcattggagaaaagtatagatggcctcataccattccatatgttctagaagatagcttggaaatgaatgctaagggagttatcctcaatgcatttgaacgttatcgccttaaaacatgtattgactttaagccttgggctggagaaacaaactatatatcagtgttcaagggcagtggctgctggtcttcagtaggaaataggcgggttgggaagcaagaactttccatcggggcaaactgtgaccgaatagcaacagttcaacacgagttcctccacgctctgggattctggcatgagcagtcgcgttctgaccgggatgactatgtcaggataatgtgggacagaattctgtcaggcagagagcacaattttaacacctatagtgacgatatatcagattccctgaatgttccctatgattacacttcagtaatgcactacagtaaaactgcattccaaaatggaacagagccgacaattgtcacaagaatctcagactttgaggatgtgatcggccaacgaatggatttcagtgactctgatctcctaaagttgaatcaactgtataactgctcctcttccttgagttttatggactcgtgcagttttgaactggaaaatgtgtgtggcatgatccaaagttcaggagataatgctgactggcaacgggtttcacaggttcccagggggccagagagtgatcactccaacatgggccagtgccaaggttctggtttcttcatgcatttcgatagcagctctgtaaatgtgggggccacagcagtgctggaaagtagaacgctgtaccctaaaagaggatttcagtgcctgcaattttacttatataacagtggcagtgaaagtgatcaactgaacatctatatcagggagtattctgcagacaatgtggatggcaatttaacccttgtggaagaaataaaagaaatacccactgggagctggcaactttatcatgtaacattgaaagtgaccaagaagtttagagtggtgtttgaaggacgcaaaggctctggtgcatcactgggtggtctgtctattgatgacatcaatctttcggaaacacggtgccctcatcatatctggcatataaggaatttcacacagttcattggcagcccaaatggaactctgtatagccctccattttactcttctaaaggttatgcctttcagatttacttaaatctagcccatgtgactaatgcagggatatatttccacttgatctctggagccaatgatgatcaattacagtggccatgtccttggcaacaagccacaatgacacttttggatcaaaatcctgacattcgacagcgtatgtccaatcagcggagtataactacagacccatttatgaccaccgataatggaaactatttctgggacaggccttccaaagtgggaacagtggctttgttccctaatggaactcagtttagaagaggtgggggctatggaaccagtgcctttataacccacgaaaggctgaaaagcagagattttataaaaggagatgatgtttatatcctactgacagtggaagacatatctcacctcaactctacacaaatccagctaacaccagcccctagtgttcaagacctctgctcaaaaaccacctgtaaaaatgacggtgtctgcactgttcgagatggcaaagctgagtgcaggtgccagtcaggggaagactggtggtacatgggagaaaggtgtgaaaagagaggctccacccgagacacc

SEQ ID NO: 4029 - DNA, 927 bp, Homo Sapiens
cctcactttactaagcagcctgagagcatgaatgtcaccagaaacacagccttcaacctcacctgtcaggctgtgggcccgcctgagcccgtcaacattttctgggttcaaaacagtagccgtgttaacgaacagcctgaaaaatccccctccgtgctaactgttccaggcctgacggagatggcggtcttcagttgtgaggcccacaatgacaaagggctgaccgtgtccaagggagtgcagatcaacatcaaagcaattccctccccaccaactgaagtcagcatccgtaacagcactgcacacagcattctgatctcctgggttcctggttttgatggatactccccgttcaggaattgcagcattcaggtcaaggaagctgatccgctgagtaatggctcagtcatgatttttaacacctctgccttaccacatctgtaccaaatcaagcagctgcaagccctggctaattacagcattggtgtttcctgcatgaatgaaataggctggtctgcagtgagcccttggattctagccagcacgactgaaggagccccatcagtagcacctttaaatgtcactgtgtttctgaatgaatctagtgataatgtggacatcagatggatgaagcctccgactaagcagcaggatggagaactggtgggctaccggatatcccacgtgtggcagagtgcagggatttccaaagagctcttggaggaagttggccagaatggcagccgagctcggatctctgttcaagtccacaatgctacgtgcacagtgaggattgcagccgtcaccaaagggggagttgggcccttcagtgatccagtgaaaatatttatccctgcacacggttgggtagattatgccccctcttcaactccggcgcctggcaacgcagatcctgtgctcatcatc

SEQ ID NO: 4030 - DNA, 2724 bp, Homo Sapiens
gagtgtaaagaggcactagcaaagtccgagatgaatgtgaatatgaagtatcagcttcccaacttcaccgcggaaacacccatccagaatgtcattctacatgagcatcacattttccttggtgccactaactacatttatgttttaaatgaggaagaccttcagaaggttgctgagtacaagactgggcctgtgctggaacacccagattgtttcccatgtcaggactgcagcagcaaagccaatttatcaggaggtgtttggaaagataacatcaacatggctctagttgtcgacacctactatgatgatcaactcattagctgtggcagcgtcaacagagggacctgccagcgacatgtctttccccacaatcatactgctgacatacagtcggaggttcactgcatattctccccacagatagaagagcccagccagtgtcctgactgtgtggtgagcgccctgggagccaaagtcctttcatctgtaaaggaccggttcatcaacttctttgtaggcaataccataaattcttcttatttcccagatcatccattgcattcgatatcagtgagaaggctaaaggaaacgaaagatggttttatgtttttgacggaccagtcctacattgatgttttacctgagttcagagattcttaccccattaagtatgtccatgcctttgaaagcaacaattttatttacttcttgacggtccaaagggaaactctagatgctcagacttttcacacaagaataatcaggttctgttccataaactctggattgcattcctacatggaaatgcctctggagtgtattctcacagaaaagagaaaaaagagatccacaaagaaggaagtgtttaatatacttcaggctgcgtatgtcagcaagcctggggcccagcttgctagacaaataggagccagcctgaatgatgacattcttttcggggtgttcgcacaaagcaagccagattctgccgaaccaatggatcgatctgccatgtgtgcattccctatcaaatatgtcaacgacttcttcaacaagatcgtcaacaaaaacaatgtgagatgtctccagcatttttacggacccaatcatgagcactgctttaataggacacttctgagaaattcatcaggctgtgaagcgcgccgtgatgaatatcgaacagagtttaccacagctttgcagcgcgttgacttattcatgggtcaattcagcgaagtcctcttaacatctatatccaccttcattaaaggagacctcaccatagctaatcttgggacatcagagggtcgcttcatgcaggttgtggtttctcgatcaggaccatcaacccctcatgtgaattttctcctggactcccatccagtgtctccagaagtgattgtggagcatacattaaaccaaaatggctacacactggttatcactgggaagaagatcacgaagatcccattgaatggcttgggctgcagacatttccagtcctgcagtcaatgcctctctgccccaccctttgttcagtgtggctggtgccacgacaaatgtgtgcgatcggaggaatgcctgagcgggacatggactcaacagatctgtctgcctgcaatctacaaggttttcccaaatagtgcaccccttgaaggagggacaaggctgaccatatgtggctgggactttggatttcggaggaataataaatttgatttaaagaaaactagagttctccttggaaatgagagctgcaccttgactttaagtgagagcacgatgaatacattgaaatgcacagttggtcctgccatgaataagcatttcaatatgtccataattatttcaaatggccacgggacaacacaatacagtacattctcctatgtggatcctgtaataacaagtatttcgccgaaatacggtcctatggctggtggcactttacttactttaactggaaattacctaaacagtgggaattctagacacatttcaattggtggaaaaacatgtactttaaaaagtgtgtcaaacagtattcttgaatgttataccccagcccaaaccatttcaactgagtttgctgttaaattgaaaattgacttagccaaccgagagacaagcatcttcagttaccgtgaagatcccattgtctatgaaattcatccaaccaaatcttttattagtggtgggagcacaataacaggtgttgggaaaaacctgaattcagttagtgtcccgagaatggtcataaatgtgcatgaagcaggaaggaactttacagtggcatgtcaacatcgctctaattcagagataatctgttgtaccactccttccctgcaacagctgaatctgcaactccccctgaaaaccaaagcctttttcatgttagatgggatcctttccaaatactttgatctcatttatgtacataatcctgtgtttaagccttttgaaaagccagtgatgatctcaatgggcaatgaaaatgtactggaaattaagggaaatgatattgaccctgaagcagttaaaggtgaagtgttaaaagttggaaataagagctgtgagaatatacacttacattctgaagccgttttatgcacggtccccaatgacctgctgaaattgaacagcgagctaaatatagagtggaagcaagcaatttcttcaaccgtccttggaaaagtaatagttcaaccagatcagaatttcaca

SEQ ID NO: 4031 - DNA, 387 bp, Homo Sapiens
gcttttgttttggaagatgtggacttcgaccaaatggtttcactggaagcaaatcgtagttcttacaatgcatcctttccctcaagctttgaactctcagcaagttcccactcggatgatgacgtcatcatagccaaagagggaactagcgtttcaattgagtgtcttctcacagccagtcactatgaagatgtccattggcacaattcaaaaggacagcaactggatggcagaagcagaggtggaaagtggttggtttctgataacttcctaaacatcaccaatgtagcttttgatgaccgtgggctctatacctgtttcgtcacctctccaattcgtgcctcctactctgtcaccctacgtgttatcttcacctcgggagacatg

SEQ ID NO: 4032 - DNA, 363 bp, Homo Sapiens
aaatctgtcactaattctacgttgaacggtactaatgtagtgctgggctccgttccagtcataatcgctagaaccgatcacataattgtgaaagaaggcaacagcgctctgataaattgctccgtctatggcatacccgacccccagttcaagtggtacaactcaatagggaaactactgaaagaagaagaagatgagaaggagcgtggggggggtaagtggcaaatgcatgacagtggtttgttgaacataactaaggtgtctttttccgatcgtgggaaatatacttgtgtcgcaagtaacatttacgggacggtaaataacaccgtcacgttaagagtcatctttacatccggggatatg

SEQ ID NO: 4033 - DNA, 936 bp, Homo Sapiens
ctggatatctgttccaaaaacccctgccacaacggtggtttatgcgaggagatttcccaagaagtgcgaggagatgtcttcccctcgtacacctgcacgtgccttaagggctacgcgggcaaccactgtgagacgaaatgtgtcgagccactgggcatggagaatgggaacattgccaactcacagatcgccgcctcatctgtgcgtgtgaccttcttgggtttgcagcattgggtcccggagctggcccgcctgaaccgcgcaggcatggtcaatgcctggacacccagcagcaatgacgataacccctggatccaggtgaacctgctgcggaggatgtgggtaacaggtgtggtgacgcagggtgccagccgcttggccagtcatgagtacctgaaggccttcaaggtggcctacagccttaatggacacgaattcgatttcatccatgatgttaataaaaaacacaaggagtttgtgggtaactggaacaaaaacgcggtgcatgtcaacctgtttgagacccctgtggaggctcagtacgtgagattgtaccccacgagctgccacacggcctgcactctgcgctttgagctactgggctgtgagctgaacggatgcgccaatcccctgggcctgaagaataacagcatccctgacaagcagatcacggcctccagcagctacaagacctggggcttgcatctcttcagctggaacccctcctatgcacggctggacaagcagggcaacttcaacgcctgggttgcggggagctacggtaacgatcagtggctgcagatcttccctggcaactgggacaaccactcccacaagaagaacttgtttgagacgcccatcctggctcgctatgtgcgcatcctgcctgtagcctggcacaaccgcatcgccctgcgcctggagctgctgggctgt

SEQ ID NO: 4034 - DNA, 2070 bp, Homo Sapiens
ggcatggaggtgcggtggtgcgccacctcggacccagagcagcacaagtgcggcaacatgagcgaggccttccgggaagcgggcatccagccctccctcctctgcgtccggggcacctccgccgaccactgcgtccagctcatcgcggcccaggaggctgacgccatcactctggatggaggagccatctatgaggcgggaaaggagcacggcctgaagccggtggtgggcgaagtgtacgatcaagaggtcggtacctcctattacgccgtggctgtggtcaggaggagctcccatgtgaccattgacaccctgaaaggcgtgaagtcctgccacacgggcatcaatcgcacagtgggctggaacgtgcccgtgggctacctggtggagagcggccgcctctcggtgatgggctgcgatgtactcaaagctgtcagcgactattttgggggcagctgcgtcccgggggcaggagagaccagttactctgagtccctctgtcgcctctgcaggggtgacagctctggggaaggggtgtgtgacaagagccccctggagagatactacgactacagcggggccttccggtgcctggcggaaggggcaggggacgtggcttttgtgaagcacagcacggtactggagaacacggatgggaagacgcttccctcctggggccaggccctgctgtcacaggacttcgagctgctgtgccgggatggtagccgggccgatgtcaccgagtggaggcagtgccatctggcccgggtgcctgctcacgccgtggtggtccgggccgacacagatgggggcctcatcttccggctgctcaacgaaggccagcgtctgttcagccacgagggcagcagcttccagatgttcagctctgaggcctatggccagaaggatctactcttcaaagactctacctcggagcttgtgcccatcgccacacagacctatgaggcgtggctgggccatgagtacctgcacgccatgaagggtctgctctgtgaccccaaccggctgcccccctacctgcgctggtgtgtgctctccactcccgagatccagaagtgtggagacatggccgtggccttccgccggcagcggctcaagccagagatccagtgcgtgtcagccaagtccccccaacactgcatggagcggatccaggctgagcaggtcgacgctgtgaccctgagtggcgaggacatttacacggcggggaagacgtacggcctggttcccgcagccggggagcactatgccccggaagacagcagcaactcgtactacgtggtggccgtggtgagacgggacagctcccacgccttcaccttggatgagcttcggggcaagcgctcctgccacgccggtttcggcagccctgcaggctgggatgtccccgtgggtgcccttattcagagaggcttcatccggcccaaggactgtgacgtcctcacagcagtgagcgagttcttcaatgccagctgcgtgcccgtgaacaaccccaagaactacccctcctcgctgtgtgcactgtgcgtgggggacgagcagggccgcaacaagtgtgtgggcaacagccaggagcggtattacggctaccgcggcgccttcaggtgcctggtggagaatgcgggtgacgttgccttcgtcaggcacacaaccgtctttgacaacacaaacggccacaattccgagccctgggctgctgagctcaggtcagaggactatgaactgctgtgccccaacggggcccgagccgaggtgtcccagtttgcagcctgcaacctggcacagataccaccccacgccgtgatggtccggcccgacaccaacatcttcaccgtgtatggactgctggacaaggcccaggacctgtttggagacgaccacaataagaacgggttcaaaatgttcgactcctccaactatcatggccaagacctgcttttcaaggatgccaccgtccgggcggtgcctgtcggagagaaaaccacctaccgcggctggctggggctggactacgtggcggcgctggaagggatgtcgtctcagcagtgc

SEQ ID NO: 4035 - DNA, 852 bp, Homo Sapiens
gagccccacagtcttcgttataacctcacggtgctgtcctgggatggatctgtgcagtcagggtttctcactgaggtacatctggatggtcagcccttcctgcgctgtgacaggcagaaatgcagggcaaagccccagggacagtgggcagaagatgtcctgggaaataagacatgggacagagagaccagagacttgacagggaacggaaaggacctcaggatgaccctggctcatatcaaggaccagaaagaaggcttgcattccctccaggagattagggtctgtgagatccatgaagacaacagcaccaggagctcccagcatttctactacgatggggagctcttcctctcccaaaacctggagactgaggaatggacaatgccccagtcctccagagctcagaccttggccatgaacgtcaggaatttcttgaaggaagatgccatgaagaccaagacacactatcacgctatgcatgcagactgcctgcaggaactacggcgatatctaaaatccggcgtagtcctgaggagaacagtgccccccatggtgaatgtcacccgcagcgaggcctcagagggcaacattaccgtgacatgcagggcttctggcttctatccctggaatatcacactgagctggcgtcaggatggggtatctttgagccacgacacccagcagtggggggatgtcctgcctgatgggaatggaacctaccagacctgggtggccaccaggatttgccaaggagaggagcagaggttcacctgctacatggaacacagcgggaatcacagcactcaccctgtgccctctgggaaagtgctggtgcttcagagtcattgg

SEQ ID NO: 4036 - DNA, 732 bp, Homo Sapiens
gctgagccccacagtcttcgttacaacctcatggtgctgtcccaggatggatctgtgcagtcagggtttctcgctgagggacatctggatggtcagcccttcctgcgctatgacaggcagaaacgcagggcaaagccccagggacagtgggcagaagatgtcctgggagctgagacctgggacacagagaccgaggacttgacagagaatgggcaagacctcaggaggaccctgactcatatcaaggaccagaaaggagtgccccagtcctccagagctcagaccttggctatgaacgtcacaaatttctggaaggaagatgccatgaagaccaagacacactatcgcgctatgcaggcagactgcctgcagaaactacagcgatatctgaaatccggggtggccatcaggagaacagtgccccccatggtgaatgtcacctgcagcgaggtctcagagggcaacatcaccgtgacatgcagggcttccagcttctatccccggaatatcacactgacctggcgtcaggatggggtatctttgagccacaacacccagcagtggggggatgtcctgcctgatgggaatggaacctaccagacctgggtggccaccaggattcgccaaggagaggagcagaggttcacctgctacatggaacacagcgggaatcacggcactcaccctgtgccctctgggaaggcgctggtgcttcagagtcaacggacagac

SEQ ID NO: 4037 - DNA, 342 bp, Homo Sapiens
ccgatgttcatcgtaaacaccaacgtgccccgcgcctccgtgccggacgggttcctctccgagctcacccagcagctggcgcaggccaccggcaagcccccccagtacatcgcggtgcacgtggtcccggaccagctcatggccttcggcggctccagcgagccgtgcgcgctctgcagcctgcacagcatcggcaagatcggcggcgcgcagaaccgctcctacagcaagctgctgtgcggcctgctggccgagcgcctgcgcatcagcccggacagggtctacatcaactattacgacatgaacgcggccaatgtgggctggaacaactccaccttcgcc

SEQ ID NO: 4038 - DNA, 624 bp, Homo Sapiens
agaaaagctgtattggattgtgaggcaatgaaaacaaatgaattcccttctccatgtttggactcaaagactaaggtggttatgaagggtcaaaatgtatctatgttttgttcccataagaacaaatcactgcagatcacctattcattgtttcgacgtaagacacacctgggaacccaggatggaaaaggtgaacctgcgatttttaacctaagcatcacagaagcccatgaatcaggcccctacaaatgcaaagcccaagttaccagctgttcaaaatacagtcgtgacttcagcttcacgattgtcgacccggtgacttccccagtgctgaacattatggtcattcaaacagaaacagaccgacatataacattacattgcctctcagtcaatggctcgctgcccatcaattacactttctttgaaaaccatgttgccatatcaccagctatttccaagtatgacagggagcctgctgaatttaacttaaccaagaagaatcctggagaagaggaagagtataggtgtgaagctaaaaacagattgcctaactatgcaacatacagtcaccctgtcaccatgccctcaacaggcggagacagctgtcctttctgtctgaag

SEQ ID NO: 4039 - DNA, 1482 bp, Homo Sapiens
tacgccctcaccgggaggaagtggaacaaccaccatctgacctttagcatccagaactacacggagaagttgggctggtaccactcgatggaggcggtgcgcagggccttccgcgtgtgggagcaggccacgcccctggtcttccaggaggtgccctatgaggacatccggctgcggcgacagaaggaggccgacatcatggtactctttgcctctggcttccacggcgacagctcgccgtttgatggcaccggtggctttctggcccacgcctatttccctggccccggcctaggcggggacacccattttgacgcagatgagccctggaccttctccagcactgacctgcatggaaacaacctcttcctggtggcagtgcatgagctgggccacgcgctggggctggagcactccagcaaccccaatgccatcatggcaccgttctaccagtggaaggacgttgacaacttcaagctgcccgaggacgatctccgtggcatccagcagctctacggtaccccagacggtcagccacagcctacccagcctctccccactgtgacgccacggcggccaggccggcctgaccaccggccgccccggcctccccagccaccacccccaggtgggaagccagagcggcccccaaagccgggccctccagtccagccccgagccacagagcggcccgaccagtatggccccaacatctgcgacggggactttgacacagtggccatgcttcgcggggagatgttcgtgttcaagggccgctggttctggcgagtccggcacaaccgcgtcctggacaactatcccatgcccatcgggcacttctggcgtggtctgcccggtgacatcagtgctgcctacgagcgccaagacggtcgttttgtctttttcaaaggtgaccgctactggctctttcgagaagcgaacctggagcccggctacccacagccgctgaccagctatggcctgggcatcccctatgaccgcattgacacggccatctggtgggagcccacaggccacaccttcttcttccaagaggacaggtactggcgcttcaacgaggagacacagcgtggagaccctgggtaccccaagcccatcagtgtctggcaggggatccctgcctcccctaaaggggccttcctgagcaatgacgcagcctacacctacttctacaagggcaccaaatactggaaattcgacaatgagcgcctgcggatggagcccggctaccccaagtccatcctgcgggacttcatgggctgccaggagcacgtggagccaggcccccgatggcccgacgtggcccggccgcccttcaacccccacgggggtgcagagcccggggcggacagcgcagagggcgacgtgggggatggggatggggactttggggccggggtcaacaaggacgggggcagccgcgtggtggtgcagatggaggaggtggcacggacggtgaac

SEQ ID NO: 4040 - DNA, 1335 bp, Homo Sapiens
tatgcattgacaggacagaaatggcagcacaagcacatcacttacagtataaagaacgtaactccaaaagtaggagaccctgagactcgtaaagctattcgccgtgcctttgatgtgtggcagaatgtaactcctctgacatttgaagaagttccctacagtgaattagaaaatggcaaacgtgatgtggatataaccattatttttgcatctggtttccatggggacagctctccctttgatggagagggaggatttttggcacatgcctacttccctggaccaggaattggaggagatacccattttgactcagatgagccatggacactaggaaatcctaatcatgatggaaatgacttatttcttgtagcagtccatgaactgggacatgctctgggattggagcattccaatgaccccactgccatcatggctccattttaccagtacatggaaacagacaacttcaaactacctaatgatgatttacagggcatccagaagatatatggtccacctgacaagattcctccacctacaagacctctaccgacagtgcccccacaccgctctattcctccggctgacccaaggaaaaatgacaggccaaaacctcctcggcctccaaccggcagaccctcctatcccggagccaaacccaacatctgtgatgggaactttaacactctagctattcttcgtcgtgagatgtttgttttcaaggaccagtggttttggcgagtgagaaacaacagggtgatggatggatacccaatgcaaattacttacttctggcggggcttgcctcctagtatcgatgcagtttatgaaaatagcgacgggaattttgtgttctttaaaggtaacaaatattgggtgttcaaggatacaactcttcaacctggttaccctcatgacttgataacccttggaagtggaattccccctcatggtattgattcagccatttggtgggaggacgtcgggaaaacctatttcttcaagggagacagatattggagatatagtgaagaaatgaaaacaatggaccctggctatcccaagccaatcacagtctggaaagggatccctgaatctcctcagggagcatttgtacacaaagaaaatggctttacgtatttctacaaaggaaaggagtattggaaattcaacaaccagatactcaaggtagaacctggatatccaagatccatcctcaaggattttatgggctgtgatggaccaacagacagagttaaagaaggacacagcccaccagatgatgtagacattgtcatcaaactggacaacacagccagcactgtgaaagcc

SEQ ID NO: 4041 - DNA, 1320 bp, Homo Sapiens
caggctccagcccccaccaagtggaacaagaggaacctgtcgtggagggtccggacgttcccacgggactcaccactggggcacgacacggtgcgtgcactcatgtactacgccctcaaggtctggagcgacattgcgcccctgaacttccacgaggtggcgggcagcaccgccgacatccagatcgacttctccaaggccaaccataacgacggctaccccttcgacggccccggcggcaccgtggcccacgccttcttccccggccaccacaacaccgccggggacacccactttgacgatgacgaggcctggaccttccgctcctcggatgcccacgggatggacctgtttgcagtggctgtccacgagtttggccacgccattgggttaagccatgtggccgctgcacactccatcatgcggccgtactaccagggcccggtgggtgacccgctgcgctacgggctcccctacgaggacaaggtgcgcgtctggcagctgtacggtgtgcgggagtctgtgtctcccacggcgcagcccgaggagcctcccctgctgccggagcccccagacaaccggtccagcgccccgcccaggaaggacgtgccccacagatgcagcactcactttgacgcggtggcccagatccggggtgaagctttcttcttcaaaggcaagtacttctggcggctgacgcgggaccggcacctggtgtccctgcagccggcacagatgcaccgcttctggcggggcctgccgctgcacctggacagcgtggacgccgtgtacgagcgcaccagcgaccacaagatcgtcttctttaaaggagacaggtactgggtgttcaaggacaataacgtagaggaaggatacccgcgccccgtctccgacttcagcctcccgcctggcggcatcgacgctgccttctcctgggcccacaatgacaggacttatttctttaaggaccagctgtactggcgctacgatgaccacacgaggcacatggaccccggctaccccgcccagagccccctgtggaggggtgtccccagcacgctggacgacgccatgcgctggtccgacggtgcctactacttcttccgtggccaggagtactggaaagtgctggatggcgagctggaggtggcacccgggtacccacagtccacggcccgggactggctggtgtgtggagactcacaggccgatggatctgtggctgcgggcgtggacgcggcagaggggccccgcgcccctccaggacaacatgaccagagccgctcggaggacggttacgaggtctgctcatgcacctct

SEQ ID NO: 4042 - DNA, 1653 bp, Homo Sapiens
tacaacttcttccctcgcaagcccaagtgggacaagaaccagatcacatacaggatcattggctacacacctgatctggacccagagacagtggatgatgcctttgctcgtgccttccaagtctggagcgatgtgaccccactgcggttttctcgaatccatgatggagaggcagacatcatgatcaactttggccgctgggagcatggcgatggatacccctttgacggtaaggacggactcctggctcatgccttcgccccaggcactggtgttgggggagactcccattttgatgacgatgagctatggaccttgggagaaggccaagtggtccgtgtgaagtatggcaacgccgatggggagtactgcaagttccccttcttgttcaatggcaaggagtacaacagctgcactgataccggccgcagcgatggcttcctctggtgctccaccacctacaactttgagaaggatggcaagtacggcttctgtccccatgaagccctgttcaccatgggcggcaacgctgaaggacagccctgcaagtttccattccgcttccagggcacatcctatgacagctgcaccactgagggccgcacggatggctaccgctggtgcggcaccactgaggactacgaccgcgacaagaagtatggcttctgccctgagaccgccatgtccactgttggtgggaactcagaaggtgccccctgtgtcttccccttcactttcctgggcaacaaatatgagagctgcaccagcgccggccgcagtgacggaaagatgtggtgtgcgaccacagccaactacgatgacgaccgcaagtggggcttctgccctgaccaagggtacagcctgttcctcgtggcagcccacgagtttggccacgccatggggctggagcactcccaagaccctggggccctgatggcacccatttacacctacaccaagaacttccgtctgtcccaggatgacatcaagggcattcaggagctctatggggcctctcctgacattgaccttggcaccggccccacccccacactgggccctgtcactcctgagatctgcaaacaggacattgtatttgatggcatcgctcagatccgtggtgagatcttcttcttcaaggaccggttcatttggcggactgtgacgccacgtgacaagcccatggggcccctgctggtggccacattctggcctgagctcccggaaaagattgatgcggtatacgaggccccacaggaggagaaggctgtgttctttgcagggaatgaatactggatctactcagccagcaccctggagcgagggtaccccaagccactgaccagcctgggactgccccctgatgtccagcgagtggatgccgcctttaactggagcaaaaacaagaagacatacatctttgctggagacaaattctggagatacaatgaggtgaagaagaaaatggatcctggctttcccaagctcatcgcagatgcctggaatgccatccccgataacctggatgccgtcgtggacctgcagggcggcggtcacagctacttcttcaagggtgcctattacctgaagctggagaaccaaagtctgaagagcgtgaagtttggaagcatcaaatccgactggctaggctgc

SEQ ID NO: 4043 - DNA, 1278 bp, Homo Sapiens
tatgccctgactggacagaagtggaggcaaaaacacatcacctacagcattcacaactataccccaaaagtgggtgagctagacacgcggaaagctattcgccaggctttcgatgtgtggcagaaggtgaccccactgacctttgaagaggtgccataccatgagatcaaaagtgaccggaaggaggcagacatcatgatcttttttgcttctggtttccatggcgacagctccccatttgatggagaagggggattcctggcccatgcctacttccctggcccagggattggaggagacacccactttgactccgatgagccatggacgctaggaaatgccaaccatgacgggaacgacctcttcctggtggctgtgcatgagctgggccacgcgctgggactggagcactccagcgaccccagcgccatcatggcgcccttctaccagtacatggagacgcacaacttcaagctgccccaggacgatctccagggcatccagaagatctatggacccccagccgagcctctggagcccacaaggccactccctacactccccgtccgcaggatccactcaccatcggagaggaaacacgagcgccagcccaggccccctcggccgcccctcggggaccggccatccacaccaggcaccaaacccaacatctgtgacggcaacttcaacacagtggccctcttccggggcgagatgtttgtctttaaggatcgctggttctggcgtctgcgcaataaccgagtgcaggagggctaccccatgcagatcgagcagttctggaagggcctgcctgcccgcatcgacgcagcctatgaaagggccgatgggagatttgtcttcttcaaaggtgacaagtattgggtgtttaaggaggtgacggtggagcctgggtacccccacagcctgggggagctgggcagctgtttgccccgtgaaggcattgacacagctctgcgctgggaacctgtgggcaagacctactttttcaaaggcgagcggtactggcgctacagcgaggagcggcgggccacggaccctggctaccctaagcccatcaccgtgtggaagggcatcccacaggctccccaaggagccttcatcagcaaggaaggatattacacctatttctacaagggccgggactactggaagtttgacaaccagaaactgagcgtggagccaggctacccgcgcaacatcctgcgtgactggatgggctgcaaccagaaggaggtggagcggcggaaggagcggcgg

SEQ ID NO: 4044 - DNA, 813 bp, Homo Sapiens
tttgcaaagcaaggtaacaaatggtacaagcagcacctctcctaccgcctggtgaactggcctgagcatctgccggagccggcagttcggggcgccgtgcgcgccgccttccagttgtggagcaacgtctcagcgctggagttctgggaggccccagccacaggccccgctgacatccggctcaccttcttccaaggggaccacaacgatgggctgggcaatgcctttgatggcccagggggcgccctggcgcacgccttcctgccccgccgcggcgaagcgcacttcgaccaagatgagcgctggtccctgagccgccgccgcgggcgcaacctgttcgtggtgctggcgcacgagatcggtcacacgcttggcctcacccactcgcccgcgccgcgcgcgctcatggcgccctactacaagaggctgggccgcgacgcgctgctcagctgggacgacgtgctggccgtgcagagcctgtatgggaagcccctagggggctcagtggccgtccagctcccaggaaagctgttcactgactttgagacctgggactcctacagcccccaaggaaggcgccctgaaacgcagggccctaaatactgccactcttccttcgatgccatcactgtagacaggcaacagcaactgtacatttttaaagggagccatttctgggaggtggcagctgatggcaacgtctcagagccccgtccactgcaggaaagatgggtcgggctgccccccaacattgaggctgcggcagtgtcattgaatgatggagatttctacttcttcaaagtgcaatccgtt

SEQ ID NO: 4045 - DNA, 1803 bp, Homo Sapiens
ttccaaacctttgagggcgacctcaagtggcaccaccacaacatcacctattggatccaaaactactcggaagacttgccgcgggcggtgattgacgacgcctttgcccgcgccttcgcactgtggagcgcggtgacgccgctcaccttcactcgcgtgtacagccgggacgcagacatcgtcatccagtttggtgtcgcggagcacggagacgggtatcccttcgacgggaaggacgggctcctggcacacgcctttcctcctggccccggcattcagggagacgcccatttcgacgatgacgagttgtggtccctgggcaagggcgtcgtggttccaactcggtttggaaacgcagatggcgcggcctgccacttccccttcatcttcgagggccgctcctactctgcctgcaccaccgacggtcgctccgacggcttgccctggtgcagtaccacggccaactacgacaccgacgaccggtttggcttctgccccagcgagagactctacacccgggacggcaatgctgatgggaaaccctgccagtttccattcatcttccaaggccaatcctactccgcctgcaccacggacggtcgctccgacggctaccgctggtgcgccaccaccgccaactacgaccgggacaagctcttcggcttctgcccgacccgagctgactcgacggtgatggggggcaactcggcgggggagctgtgcgtcttccccttcactttcctgggtaaggagtactcgacctgtaccagcgagggccgcggagatgggcgcctctggtgcgctaccacctcgaactttgacagcgacaagaagtggggcttctgcccggaccaaggatacagtttgttcctcgtggcggcgcatgagttcggccacgcgctgggcttagatcattcctcagtgccggaggcgctcatgtaccctatgtaccgcttcactgaggggccccccttgcataaggacgacgtgaatggcatccggcacctctatggtcctcgccctgaacctgagccacggcctccaaccaccaccacaccgcagcccacggctcccccgacggtctgccccaccggaccccccactgtccacccctcagagcgccccacagctggccccacaggtcccccctcagctggccccacaggtccccccactgctggcccttctacggccactactgtgcctttgagtccggtggacgatgcctgcaacgtgaacatcttcgacgccatcgcggagattgggaaccagctgtatttgttcaaggatgggaagtactggcgattctctgagggcagggggagccggccgcagggccccttccttatcgccgacaagtggcccgcgctgccccgcaagctggactcggtctttgaggagccgctctccaagaagcttttcttcttctctgggcgccaggtgtgggtgtacacaggcgcgtcggtgctgggcccgaggcgtctggacaagctgggcctgggagccgacgtggcccaggtgaccggggccctccggagtggcagggggaagatgctgctgttcagcgggcggcgcctctggaggttcgacgtgaaggcgcagatggtggatccccggagcgccagcgaggtggaccggatgttccccggggtgcctttggacacgcacgacgtcttccagtaccgagagaaagcctatttctgccaggaccgcttctactggcgcgtgagttcccggagtgagttgaaccaggtggaccaagtgggctacgtgacctatgacatcctgcagtgccctgaggac

SEQ ID NO: 4046 - DNA, 3627 bp, Homo Sapiens
cttaacaacagtaagcattcttggactatacctgaggatgggaactctcagaagactatgccttctgcttcagttcctccaaataaaatacaaagtttgcaaatactgccaaccactcgggtcatgtcggcggagatagctacaactccagaggcaagaacttctgaagacagtcttcttaaatcaacactgcctccctcagaaacaagtgcacctgctgagggtgtgagaaatcaaactctcacatccacagagaaagcagaaggagtggtcaagttacagaatcttaccctcccaaccaacgctagcatcaagttcaatcctggagcagaatcagtggtcctttccaattctacactgaaatttcttcagagctttgccagaaagtcaaatgaacaagcaacttctctaaacacagttggaggcactggaggcattggaggcgttggaggcactggaggcgtgggaaatcgagccccacgggaaacatacctcagccggggtgacagcagttccagccaaagaactgactaccaaaaatcaaatttcgaaacaactagaggaaagaattggtgtgcttatgtacataccaggttatctcccacagtgatattggacaaccaggtcacttatgtcccaggtgggaaaggaccttgtggctggaccggtggatcctgtcctcagagatctcagaagatatccaatcctgtctataggatgcaacataaaattgtcacctcattggattggaggtgctgtcctggatacagtgggccgaaatgtcaactaagagcccaggaacagcaaagtttgatacacaccaaccaggctgaaagtcatacagctgttggcagaggagtagctgagcagcagcagcagcaaggctgtggtgacccagaagtgatgcaaaaaatgactgatcaggtgaactaccaggcaatgaaactgactcttctgcagaagaagattgacaatatttctttgactgtgaatgatgtaaggaacacttactcctccctagaaggaaaagtcagcgaagataaaagcagagaatttcaatctcttctaaaaggtctaaaatccaaaagcattaatgtactgataagagacatagtaagagaacaatttaaaatttttcaaaatgacatgcaagagactgtagcacagctcttcaagactgtatcaagtctatcagaggacctcgaaagcaccaggcaaataattcaaaaagttaatgaatctgtggtttcaatagcagcccagcaaaagtttgttttggtgcaagagaatcggcccactttgactgatatagtggaactaaggaatcacattgtgaatgtaaggcaagaaatgactcttacatgtgagaagcctattaaagaactagaagtaaagcagactcatttagaaggtgctctagaacaggaacactcaagaagcattctgtattatgaatccctcaataaaactctttctaaattgaaggaagtacatgagcagcttttatcaactgaacaggtatcagaccagaagaatgctccagctgctgagtcagttagcaataatgtcactgagtacatgtctactttacatgaaaatataaagaagcagagtttgatgatgctgcaaatgtttgaagatttgcacattcaagaaagcaagattaacaatctcaccgtctctttggagatggagaaagagtctctcagaggtgaatgtgaagacatgttatccaaatgcagaaatgattttaaatttcaacttaaggacacagaagagaatttacatgtgttaaatcaaacattggctgaagttctctttccaatggacaataagatggacaaaatgagtgagcaactaaatgatttgacttatgatatggagatccttcaacccttgcttgagcagggagcatcactcagacagacaatgacatatgaacaaccaaaggaagcaatagtgataaggaaaaagatagaaaatctgactagtgctgtcaatagtctaaattttattatcaaagaacttacaaaaagacacaacttacttagaaatgaagtacagggtcgtgatgatgccttagaaagacgtatcaatgaatatgccttagaaatggaagatggcctcaataagacaatgactattataaataatgctattgatttcattcaagataactatgccctaaaagagactttaagtactattaaggataatagtgagatccatcataaatgtacctccgatatggaaactattttgacatttattcctcagttccaccgtctgaatgattctattcagactttggtcaatgacaatcagagatataactttgttttgcaagtcgccaagacccttgcaggtattcccagagatgagaaactaaatcagtccaacttccaaaagatgtatcaaatgttcaatgaaaccacttcccaagtgagaaaataccagcaaaatatgagtcatttggaagaaaaactactcttaactaccaagatttccaaaaattttgagactcggttgcaagacattgagtctaaagttacccagacgctcataccttattatatttcagttaaaaaaggcagtgtagttacaaatgagagagatcaggctcttcaactgcaagtattaaattccagatttaaggcgttggaagcaaaatctatccatctttcaattaacttcttttcgcttaacaaaactctccacgaagttttaacaatgtgtcacaatgcttctacaagtgtgtcagaactgaatgctaccatccctaagtggataaaacattccctgccagatattcaacttcttcagaaaggtctaagagaatttgtggaaccaataattcaaataaaaactcaagctgccctatctaatttaacttgttgtatagatcgatcgttgcctggtagtctggcaaatgttgtcaagtctcagaagcaagtaaaatcattgccaaagaaaattaacgcacttaagaaaccaacggtaaatcttaccacagtcctgataggccggactcaaagaaacacggacaacataatatatcctgaggagtattcaagctgtagtcggcatccgtgccaaaatgggggcacgtgcataaatggaagaactagctttacctgtgcctgcagacatccttttactggtgacaactgcactatcaagcttgtggaagaaaatgctttagctccagatttttccaaaggatcttacagatatgcacccatggtggcattttttgcatctcatacgtatggaatgactatacctggtcctatcctgtttaataacttggatgtcaattatggagcttcatataccccaagaactggaaaatttagaattccgtatcttggagtatatgttttcaagtacaccatcgagtcatttagtgctcatatttctggatttttagtggttgatggaatagacaagcttgcatttgagtctgaaaatattaacagtgaaatacactgtgatagggttttaactggggatgccttattagaattaaattatgggcaggaagtctggttacgacttgcaaaaggaacaattccagccaagtttccccctgttactacatttagtggctatttattatatcgtaca

SEQ ID NO: 4047 - DNA, 375 bp, Homo Sapiens
gggcagttcagagtgataggaccaagacaccctatccgggctctggtcggggatgaagtggaattgccatgtcgcatatctcctgggaagaacgctacaggcatggaggtggggtggtaccgcccccccttctctagggtggttcatctctacagaaatggcaaggaccaagatggagaccaggcacctgaatatcggggccggacagagctgctgaaagatgctattggtgagggaaaggtgactctcaggatccggaatgtaaggttctcagatgaaggaggtttcacctgcttcttccgagatcattcttaccaagaggaggcagcaatggaattgaaagtagaagatcctttctactgggtgagccctgga

SEQ ID NO: 4048 - DNA, 1398 bp, Homo Sapiens
caagatgtctccttgctggcatcagactcagagcccctgaagtgtttctcccgaacatttgaggacctcacttgcttctgggatgaggaagaggcagcgcccagtgggacataccagctgctgtatgcctacccgcgggagaagccccgtgcttgccccctgagttcccagagcatgccccactttggaacccgatacgtgtgccagtttccagaccaggaggaagtgcgtctcttctttccgctgcacctctgggtgaagaatgtgttcctaaaccagactcggactcagcgagtcctctttgtggacagtgtaggcctgccggctccccccagtatcatcaaggccatgggtgggagccagccaggggaacttcagatcagctgggaggagccagctccagaaatcagtgatttcctgaggtacgaactccgctatggccccagagatcccaagaactccactggtcccacggtcatacagctgattgccacagaaacctgctgccctgctctgcagaggcctcactcagcctctgctctggaccagtctccatgtgctcagcccacaatgccctggcaagatggaccaaagcagacctccccaagtagagaagcttcagctctgacagcagagggtggaagctgcctcatctcaggactccagcctggcaactcctactggctgcagctgcgcagcgaacctgatgggatctccctcggtggctcctggggatcctggtccctccctgtgactgtggacctgcctggagatgcagtggcacttggactgcaatgctttaccttggacctgaagaatgttacctgtcaatggcagcaacaggaccatgctagctcccaaggcttcttctaccacagcagggcacggtgctgccccagagacaggtaccccatctgggagaactgcgaagaggaagagaaaacaaatccaggactacagaccccacagttctctcgctgccacttcaagtcacgaaatgacagcattattcacatccttgtggaggtgaccacagccccgggtactgttcacagctacctgggctcccctttctggatccaccaggctgtgcgcctccccaccccaaacttgcactggagggagatctccagtgggcatctggaattggagtggcagcacccatcgtcctgggcagcccaagagacctgttatcaactccgatacacaggagaaggccatcaggactggaaggtgctggagccgcctctcggggcccgaggagggaccctggagctgcgcccgcgatctcgctaccgtttacagctgcgcgccaggctcaacggccccacctaccaaggtccctggagctcgtggtcggacccaactagggtggagaccgccaccgagaccgcctgg

SEQ ID NO: 4049 - DNA, 372 bp, Homo Sapiens
atcgtggtttacaccgacagggaggtccatggtgctgtgggctcccgggtgaccctgcactgctccttctggtccagtgagtgggtctcagatgacatctccttcacctggcgctaccagcccgaagggggcagagatgccatttcgatcttccactatgccaagggacaaccctacattgacgaggtggggaccttcaaagagcgcatccagtgggtaggggaccctcgctggaaggatggctccattgtcatacacaacctagactacagtgacaatggcacgttcacttgtgacgtcaaaaaccctccagacatagtgggcaagacctctcaggtcacgctgtatgtctttgaaaaagtgccaactagg

SEQ ID NO: 4050 - DNA, 381 bp, Homo Sapiens
tcagccttggaagtatatacgccaaaagaaatcttcgtggcaaatggtacacaagggaagctgacctgcaagttcaagtctactagtacgactggcgggttgacctcagtctcctggagcttccagccagagggggccgacactactgtgtcgtttttccactactcccaagggcaagtgtaccttgggaattatccaccatttaaagacagaatcagctgggctggagaccttgacaagaaagatgcatcaatcaacatagaaaatatgcagtttatacacaatggcacctatatctgtgatgtcaaaaaccctcctgacatcgttgtccagcctggacacattaggctctatgtcgtagaaaaagagaatttgcctgtg

SEQ ID NO: 4051 - DNA, 384 bp, Homo Sapiens
gtggaaatttatacctcccgggtgctggaggctgttaatgggacagatgctcggttaaaatgcactttctccagctttgcccctgtgggtgatgctctaacagtgacctggaattttcgtcctctagacgggggacctgagcagtttgtattctactaccacatagatcccttccaacccatgagtgggcggtttaaggaccgggtgtcttgggatgggaatcctgagcggtacgatgcctccatccttctctggaaactgcagttcgacgacaatgggacatacacctgccaggtgaagaacccacctgatgttgatggggtgataggggagatccggctcagcgtcgtgcacactgtacgcttctctgagatccacttcctg

SEQ ID NO: 4052 - DNA, 381 bp, Homo Sapiens
ttggagattcgtgcagatgcccatgtccgaggttatgttggagaaaagatcaagttgaaatgcactttcaagtcaacttcagatgtcactgacaaacttactatagactggacatatcgccctcccagcagcagccacacagtatcaatatttcattatcagtctttccagtacccaaccacagcaggcacatttcgggatcggatttcctgggttggaaatgtatacaaaggggatgcatctataagtataagcaaccctaccataaaggacaatgggacattcagctgtgctgtgaagaatcccccagatgtgcatcataatattcccatgacagagctaacagtcacagaaaggggttttggcaccatgctttcctct

SEQ ID NO: 4053 - DNA, 705 bp, Homo Sapiens
cggacgcactctctgagatattttcgcctgggcgtttcggatcccatccatggggtccctgaatttatttcggttgggtacgtggactcgcaccctatcaccacatatgacagtgtcactcggcagaaggagccacgggccccatggatggcagagaacctcgcgcctgatcactgggagaggtacactcagctgctgaggggctggcagcagatgttcaaggtggaactgaagcgcctacagaggcactacaatcactcagataatgtggctcacaccatcaagcaggcatgggaggccaatcagcatgagttgctgtatcaaaagaattggctggaagaagaatgtattgcctggctaaagagattcctggagtatgggaaagacaccctacaaagaacagagcccccactggtcagagtaaatcgcaaagaaacttttccaggggttacagctctcttctgcaaagctcatggcttttaccccccagaaatttacatgacatggatgaaaaacggggaagaaattgtccaagaaattgattatggagacattcttcccagtggggatggaacctatcaggcgtgggcatcaattgagcttgatcctcagagcagcaacctttactcctgtcatgtggagcactgcggtgtccacatggttcttcaggtcccccaggaatcagaaactatccctcttgtgatg

SEQ ID NO: 4054 - DNA, 1440 bp, Homo Sapiens
ctactggacaccaggcaatttttaatctataatgaagatcacaagcgctgcgtggatgcagtgagtcccagtgccgtccaaaccgcagcttgcaaccaggatgccgaatcacagaaattccgatgggtgtccgaatctcagattatgagtgttgcatttaaattatgcctgggagtgccatcaaaaacggactgggttgctatcactctctatgcctgtgactcaaaaagtgaatttcagaaatgggagtgcaaaaatgacacacttttggggatcaaaggagaagatttattttttaactacggcaacagacaagaaaagaatattatgctctacaagggatcgggtttatggagcaggtggaagatctatggaaccacagacaatctgtgctccagaggttatgaagccatgtatacgctactaggcaatgccaatggagcaacctgtgcattcccgttcaagtttgaaaacaagtggtacgcagattgcacgagtgctgggcggtcggatggatggctctggtgcggaaccactactgactatgacacagacaagctatttggatattgtccattgaaatttgagggcagtgaaagcttatggaataaagacccgctgaccagcgtttcctaccagataaactccaaatccgctttaacgtggcaccaggcgaggaaaagctgccaacaacagaacgctgagctcctgagcatcacagagattcatgagcaaacatacctgacaggattaaccagttccttgacctcaggactctggattggacttaacagtctgagcttcaacagcggttggcagtggagtgaccgcagtcctttccgatatttgaactggttaccaggaagtccatcagctgaacctggaaaaagctgtgtgtcactaaatcctggaaaaaatgctaaatgggaaaatctggaatgtgttcagaaactgggctatatttgcaaaaagggcaacaccactttaaattcttttgttattccctcagaaagtgatgtgcctactcactgtcctagtcagtggtggccgtatgccggtcactgttacaagattcacagagatgagaaaaaaatccagagggatgctctgaccacctgcaggaaggaaggcagtgacctcgcaagtatccacaccattgaggaattcgactttattatctcccagctaggatatgagccaaatgacgaattgtggatcggcttaaatgacattaagattcaaatgtactttgagtggagtgatgggacccctgtaacgtttaccaaatggcttcgtggagaaccaagccatgaaaacaacagacaggaggattgtgtggtgatgaaaggcaaggctggagtgcaatggcacaatcttggctcaatgcaacctctgcctcgagagttcaagcgattctcctgcctcagcctcccgagtagc

SEQ ID NO: 4055 - DNA, 4152 bp, Homo Sapiens
ggcgcccctggggacgccgccctcccggaacccaacgtcttcctcatcttcagccatggactgcagggctgcctggaggcccagggcgggcaggtcagagtcaccccggcttgcaataccagcctccctgcccagcgctggaagtgggtctcccgaaaccggctattcaacctgggtaccatgcagtgcctgggcacaggctggccaggcaccaacaccacggcctccctgggcatgtatgagtgtgaccgggaagcactgaatcttcgctggcattgtcgtacactgggtgaccagctgtccttgctcctgggggcccgcaccagcaacatatccaagcctggcacccttgagcgtggtgaccagacccgcagtggccagtggcgcatctacggcagcgaggaggacctatgtgctctgccctaccacgaggtctacaccatccagggaaactcccacggaaagccgtgcaccatccccttcaaatatgacaaccagtggttccacggctgcaccagcacgggccgcgaggatggtcacctgtggtgtgccaccacccaggactacggcaaagacgagcgctggggcttctgccccatcaagagtaacgactgcgagaccttctgggacaaggaccagctgactgacagctgctaccagtttaacttccagtccacgctgtcgtggagggaggcctgggccagctgcgagcagcagggtgcggatctgctgagcatcacggagatccacgagcagacctacatcaacggcctcctcactgggtacagctccaccctgtggatcggcttgaatgacttggacacgagcggaggctggcagtggtcggacaactcgcccctcaagtacctcaactgggagagtgaccagccggacaaccccagtgaggagaactgtggagtgatccgcactgagtcctcgggcggctggcagaaccgtgactgcagcatcgcgctgccctatgtgtgcaagaagaagcccaacgccacggccgagcccacccctccagacaggtgggccaatgtgaaggtggagtgcgagccgagctggcagcccttccagggccactgctaccgcctgcaggccgagaagcgcagctggcaggagtccaagaaggcatgtctacggggcggtggcgacctggtcagcatccacagcatggcggagctggaattcatcaccaagcagatcaagcaagaggtggaggagctgtggatcggcctcaacgatttgaaactgcagatgaattttgagtggtctgacgggagccttgtgagcttcacccactggcacccctttgagcccaacaacttccgggacagtctggaggactgtgtcaccatctggggcccggaaggccgctggaacgacagtccctgtaaccagtccttgccatccatctgcaagaaggcaggccagctgagccagggggccgccgaggaggaccatggctgccggaagggttggacgtggcacagcccatcctgctactggctgggagaagaccaagtgacctacagtgaggcccggcgcctgtgcactgaccatggctctcagctggtcaccatcaccaacaggttcgagcaggccttcgtcagcagcctcatctacaactgggagggcgagtacttctggacggccctgcaggacctcaacagcaccggctccttcttctggctcagtggggatgaagtcatgtacacccactggaaccgggaccagcccgggtacagccgtgggggctgcgtggcgctggccactggcagcgccatggggctgtgggaggtgaagaactgtacctcgttccgggcccgctacatctgccggcagagcctgggcactccagtgacgccggagctgccggggccagatcccacgcccagcctcactggctcctgtccccagggctgggcctcggacaccaaactccggtattgctataaggtgttcagctcagagcggctgcaggacaagaagagctgggtccaggcccagggggcctgccaggagctgggggcccagctgctgagcctggccagctacgaggaggagcactttgtggccaacatgctcaacaagatcttcggtgaatcagaacccgagatccacgagcagcactggttctggatcggcctgaaccgtcgggatcccagagggggtcagagttggcgctggagcgacggcgtagggttctcttaccacaatttcgaccggagccggcacgacgacgacgacatccgaggctgtgcggtgctggacctggcctccctgcagtgggtggccatgcagtgcgacacacagctggactggatctgcaagatccccagaggtacggacgtgcgggagcccgacgacagccctcaaggccgacgggaatggctgcgcttccaggaggccgagtacaagttctttgagcaccactccacgtgggcgcaggcgcagcgcatctgcacgtggttccaggccgagctgacctccgtgcacagccaggcggagctagacttcctgagccacaacttgcagaagttctcccgggcccaggagcagcactggtggatcggcctgcacacctctgagagcgatgggcgcttcagatggacagatggttccattataaacttcatctcctgggcaccaggcaaacctcggcctgtcggcaaggacaagaagtgcgtgtacatgacagccagccgagaggactggggggaccagaggtgcctgacagccttgccctacatctgcaagcgcagcaacgtcaccaaagaaacgcagcccccagacctgccaactacagccctggggggctgcccctctgactggatccagttcctcaacaagtgttttcaggtccagggccaggaaccccagagccgggtgaagtggtcagaggcacagttctcctgtgaacagcaagaggcccagctggtcaccatcacaaaccccttagagcaagcattcatcacagccagcctgcccaatgtgacctttgacctttggattggcctccatgcctcgcagagggacttccagtgggtggagcaggagcctttgatgtatgccaactgggcacctggggagccctctggccctagccctgctcccagtggcaacaaaccgaccagctgtgcggtggtcctgcacagcccctcagcccacttcactggccgctgggacgatcggagctgcacggaggagacccatggcttcatctgccagaagggcacggacccctccctgagcccgtccccagcagcgctgccccccgccccgggcactgagctctcctacctcaacggcaccttccggctgcttcagaagccgctgcgctggcacgatgccctcctgctgtgtgagagccacaatgccagcctggcctacgtgcccgacccctacacccaggccttcctcacgcaggctgcccgagggctgcgcacgccgctctggattgggctggctggcgaggagggctctcggcggtactcctgggtctcagaggagccgctgaactacgtgggctggcaggacggggagccgcagcagccggggggctgtacctacgtagatgtggacggggcctggcgcaccaccagctgtgacaccaagctgcagggggctgtgtgtggggttagcagtgggccccctcctccccgaagaataagctaccatggcagctgtccccagggactggcagactccgcgtggattcccttccgggagcactgctattctttccacatggagctgctgctgggccacaaggaggcgcgacagcgctgccagagagcgggtggggccgtcctgtctatcctggatgagatggagaatgtgtttgtctgggagcacctgcagagctatgagggccagagtcggggcgcctggctgggcatgaacttcaaccccaaaggaggcactctggtctggcaggacaacacagctgtgaactactccaactgggggcccccgggcttgggccccagcatgctgagccacaacagctgctactggattcagagcaacagcgggctatggcgccccggcgcttgcaccaacatcaccatgggtgtcgtctgcaagcttcctcgtgctgagcagagcagcttctccccatcagcgcttccagagaacccagcggcc

SEQ ID NO: 4056 - DNA, 1125 bp, Homo Sapiens
aagtgggaaacgaagaattgctcagttagttcaactaatgcaaatgatataactcaaagtctcacgggaaaaggaaatgacagcgaagaggaaatgagatttcaagaagtctttatggaacacatgagcaacatggagaagagaatccagcatattttagacatggaagccaacctcatggacacagagcatttccaaaatttcagcatgacaactgatcaaagatttaatgacattcttctgcagctaagtaccttgttttcctcagtccagggacatgggaatgcaatagatgaaatctccaagtccttaataagtttgaataccacattgcttgatttgcagctcaacatagaaaatctgaatggcaaaatccaagagaataccttcaaacaacaagaggaaatcagtaaattagaggagcgtgtttacaatgtatcagcagaaattatggctatgaaagaagaacaagtgcatttggaacaggaaataaaaggagaagtgaaagtactgaataacatcactaatgatctcagactgaaagattgggaacattctcagaccttgagaaatatcactttaattcaaggtcctcctggacccccgggtgaaaaaggagatcgaggtcccactggagaaagtggtccacgaggatttccaggtccaataggtcctccgggtcttaaaggtgatcggggagcaattggctttcctggaagtcgaggactcccaggatatgccggaaggccaggaaattctggaccaaaaggccagaaaggggaaaaggggagtggaaacacattaactccatttacgaaagttcgactggtcggtgggagcggccctcacgaggggagagtggagatactccacagcggccagtggggtacaatttgtgacgatcgctgggaagtgcgcgttggacaggtcgtctgtaggagcttgggatacccaggtgttcaagccgtgcacaaggcagctcactttggacaaggtactggtccaatatggctgaatgaagtgttttgttttgggagagaatcatctattgaagaatgtaaaattcggcaatgggggacaagagcctgttcacattctgaagatgctggagtcacttgcacttta

SEQ ID NO: 4057 - DNA, 2079 bp, Homo Sapiens
cagcgctcgccattgaatgacttccaagtgctccggggcacagagctacagcacctgctacatgcggtggtgcccgggccttggcaggaggatgtggcagatgctgaagagtgtgctggtcgctgtgggcccttaatggactgccgggccttccactacaacgtgagcagccatggttgccaactgctgccatggactcaacactcgccccacacgaggctgcggcgttctgggcgctgtgacctcttccagaagaaagactacgtacggacctgcatcatgaacaatggggttgggtaccggggcaccatggccacgaccgtgggtggcctgccctgccaggcttggagccacaagttcccgaatgatcacaagtacacgcccactctccggaatggcctggaagagaacttctgccgtaaccctgatggcgaccccggaggtccttggtgctacacaacagaccctgctgtgcgcttccagagctgcggcatcaaatcctgccgggaggccgcgtgtgtctggtgcaatggcgaggaataccgcggcgcggtagaccgcacggagtcagggcgcgagtgccagcgctgggatcttcagcacccgcaccagcaccccttcgagccgggcaagttcctcgaccaaggtctggacgacaactattgccggaatcctgacggctccgagcggccatggtgctacactacggatccgcagatcgagcgagagttctgtgacctcccccgctgcgggtccgaggcacagccccgccaagaggccacaactgtcagctgcttccgcgggaagggtgagggctaccggggcacagccaataccaccactgcgggcgtaccttgccagcgttgggacgcgcaaatccctcatcagcaccgatttacgccagaaaaatacgcgtgcaaagaccttcgggagaacttctgccggaaccccgacggctcagaggcgccctggtgcttcacactgcggcccggcatgcgcgcggccttttgctaccagatccggcgttgtacagacgacgtgcggccccaggactgctaccacggcgcaggggagcagtaccgcggcacggtcagcaagacccgcaagggtgtccagtgccagcgctggtccgctgagacgccgcacaagccgcagttcacgtttacctccgaaccgcatgcacaactggaggagaacttctgccggaacccagatggggatagccatgggccctggtgctacacgatggacccaaggaccccattcgactactgtgccctgcgacgctgcgctgatgaccagccgccatcaatcctggaccccccagaccaggtgcagtttgagaagtgtggcaagagggtggatcggctggatcagcggcgttccaagctgcgcgtggttgggggccatccgggcaactcaccctggacagtcagcttgcggaatcggcagggccagcatttctgcggggggtctctagtgaaggagcagtggatactgactgcccggcagtgcttctcctcctgccatatgcctctcacgggctatgaggtatggttgggcaccctgttccagaacccacagcatggagagccaagcctacagcgggtcccagtagccaagatggtgtgtgggccctcaggctcccagcttgtcctgctcaagctggagagatctgtgaccctgaaccagcgtgtggccctgatctgcctgccccctgaatggtatgtggtgcctccagggaccaagtgtgagattgcaggctggggtgagaccaaaggtacgggtaatgacacagtcctaaatgtggccttgctgaatgtcatctctaaccaggagtgtaacatcaagcaccgaggacgtgtgcgggagagtgagatgtgcactgagggactgttggcccctgtgggggcctgtgagggtgactacgggggcccacttgcctgctttacccacaactgctgggtcctggaaggaattataatccccaaccgagtatgcgcaaggtcccgctggccagctgtcttcacgcgtgtctctgtgtttgtggactggattcacaaggtcatgagactgggt

SEQ ID NO: 4058 - DNA, 432 bp, Homo Sapiens
cctaaacccgcaacagttgttacgggttctggtcatgcaagctctaccccaggtggagaaaaggagacttcggctacccagagaagttcagtgcccagctctactgagaagaatgcttttaattcctctctggaagatcccagcaccgactactaccaagagctgcagagagacatttctgaaatgtttttgcagatttataaacaagggggttttctgggcctctccaatattaagttcaggccaggatctgtggtggtacaattgactctggccttccgagaaggtaccatcaatgtccacgacgtggagacacagttcaatcagtataaaacggaagcagcctctcgatataacctgacgatctcagacgtcagcgtgagtgatgtgccatttcctttctctgcccagtctggggctggggtgccaggc

SEQ ID NO: 4059 - DNA, 1209 bp, Homo Sapiens
acaaaccaaggcaactctgccgatgctgtgactactaccgagacagccacctctggaccgactgtagctgcagccgacacgaccgagacaaattttcctgagacagccagcactactgcaaacaccccgtctttccctacggcaacgagtccagcgccaccaataatcagcacgcacagctcatctacaatccctaccccggcgcctcccataataagcactcattccagtagcacgattccgatacccactgctgcagattctgaatccaccacgaatgtcaacagtttggctaccagcgacatcatcacagctagtagtccgaatgacggtctgattacgatggtgccttcagagactcaaagtaacaacgagatgtcacccactacagaagataatcagtccagcggccctccaacaggcaccgcgttactagagacgtcaactttgaatagtaccggccccagcaatccgtgtcaagatgatccctgcgccgacaattcattatgtgttaaattacataatacgagcttttgtttgtgcttggagggttattactacaactcaagtacatgcaaaaagggtaaggtgtttcccgggaaaatatctgttactgtttccgagactttcgatccagaagaaaagcattccatggcatatcaggacctgcacagtgaaattaccagccttttcaaagacgtattcggtacgtccgtgtatggtcaaaccgtgatattaacagtgagcacgtctttatctcccagaagtgagatgagggcggatgacaagttcgtaaacgtaacgatagtaacaattctagctgaaaccacgtctgataatgagaaaacggttaccgagaaaatcaacaaggcaataagatcttcttcatccaattttttgaactatgatttaacattgcgttgcgactattacggctgtaatcagacggcggacgactgtttgaacggactagcttgcgattgtaagagcgatctgcagcgtcccaacccgcagagtcccttctgtgtcgcttctagcttgaagtgtcctgatgcgtgtaatgcgcagcataagcaatgcctgataaagaagtcagggggcgcacctgaatgtgcatgcgtcccaggctatcaagaagatgccaatggtaactgccaaaagtgcgctttcggatattcaggacttgattgtaaggacaaatttcagcta

SEQ ID NO: 4060 - DNA, 2193 bp, Homo Sapiens
agcacacctgtgatcacttctacccaagtcagttcatctcctgtgactcctgaaggtaccaccatgccaatctggacgcctagtgaaggaagcactccattaacaactatgcctgtcagcaccacacgtgtgaccagctctgagggtagcaccctttcaacaccttctgttgtcaccagcacacctgtgaccacttctactgaagccatttcatcttctgcaactcttgacagcaccaccatgtctgtgtcaatgcccatggaaataagcacccttgggaccactattcttgtcagtaccacacctgttacgaggtttcctgagagtagcaccccttccataccatctgtttacaccagcatgtctatgaccactgcctctgaaggcagttcatctcctacaactcttgaaggcaccaccaccatgcctatgtcaactacgagtgaaagaagcactttattgacaactgtcctcatcagccctatatctgtgatgagtccttctgaggccagcacactttcaacacctcctggtgataccagcacacctttgctcacctctaccaaagccggttcattctccatacctgctgaagtcactaccatacgtatttcaattaccagtgaaagaagcactccattaacaactctccttgtcagcaccacacttccaactagctttcctggggccagcatagcttcgacacctcctcttgacacaagcacaacttttaccccttctactgacactgcctcaactcccacaattcctgtagccaccaccatatctgtatcagtgatcacagaaggaagcacacctgggacaaccatttttattcccagcactcctgtcaccagttctactgctgatgtctttcctgcaacaactggtgctgtatctacccctgtgataacttccactgaactaaacacaccatcaacctccagtagtagtaccaccacatctttttcaactactaaggaatttacaacacccgcaatgactactgcagctcccctcacatatgtgaccatgtctactgcccccagcacacccagaacaaccagcagaggctgcactacttctgcatcaacgctttctgcaaccagtacacctcacacctctacttctgtcaccacccgtcctgtgaccccttcatcagaatccagcaggccgtcaacaattacttctcacaccatcccacctacatttcctcctgctcactccagtacacctccaacaacctctgcctcctccacgactgtgaaccctgaggctgtcaccaccatgaccaccaggacaaaacccagcacacggaccacttccttccccacggtgaccaccaccgctgtccccacgaatactacaattaagagcaaccccacctcaactcctactgtgccaagaaccacaacatgctttggagatgggtgccagaatacggcctctcgctgcaagaatggaggcacctgggatgggctcaagtgccagtgtcccaacctctattatggggagttgtgtgaggaggtggtcagcagcattgacatagggccaccggagactatctctgcccaaatggaactgactgtgacagtgaccagtgtgaagttcaccgaagagctaaaaaaccactcttcccaggaattccaggagttcaaacagacattcacggaacagatgaatattgtgtattccgggatccctgagtatgtcggggtgaacatcacaaagctacgtcttggcagtgtggtggtggagcatgacgtcctcctaagaaccaagtacacaccagaatacaagacagtattggacaatgccaccgaagtagtgaaagagaaaatcacaaaagtgaccacacagcaaataatgattaatgatatttgctcagacatgatgtgtttcaacaccactggcacccaagtgcaaaacattacggtgacccagtacgaccctgaagaggactgccggaagatggccaaggaatatggagactacttcgtagtggagtaccgggaccagaagccatactgcatcagcccctgtgagcctggcttcagtgtctccaagaactgtaacctcggcaagtgccagatgtctctaagtggacctcagtgcctctgcgtgaccacggaaactcactggtacagtggggagacctgtaaccagggcacccagaagagtctggtgtacggc

SEQ ID NO: 4061 - DNA, 1590 bp, Homo Sapiens
ggccccagcacccgcagagcagacactgcgatgacaacggacgacacagaagtgcccgctatgactctagcaccgggccacgccgctctggaaactcaaacactgagcgctgagacctcttctagggcctcaaccccagccggccccgttccagaagcagagaccaggggagccaagagaatttcccctgcaagagagaccaggagtttcacaaaaacatctcccaacttcatggtgctgatcgccacctccgtggagacatcagccgccagtggcagccccgagggagctggaatgaccacagttcagaccatcacaggcagtgatcccgaggaagccatctttgacaccctttgcaccgatgacagctctgaagaggcaaagacactcacaatggacatattgacattggctcacacctccacagaagctaagggcctgtcctcagagagcagtgcctcttccgacggcccccatccagtcatcaccccgtcacgggcctcagagagcagcgcctcttccgacggcccccatccagtcatcaccccgtcacgggcctcagagagcagcgcctcttccgacggcccccatccagtcatcaccccgtcacgggcctcagagagcagcgcctcttccgacggcccccatccagtcatcaccccctcatggtccccgggatctgacgtcactctcctcgctgaagccctggtgactgtcacaaacatcgaggttattaattgcagcatcacagaaatagaaacaacgacttccagcatccctggggcctcagacacagatcccatccccacggaaggggtgaaggcctcgtccacctccgatccaccagctctgcctgactccactgaagcaaaaccacacatcactgaggtcacagcctctgccgagaccctgtccacagccggcaccacagagtcagctgcacctgatgccacgattgggaccccactccccaccaacagcaccatagaaagagaagtgacagcacccggggccacgaccctcagtggagctctggccacagggaatcccctggaagaaacctcagccctctctgttgagacaccaagttacgtcaaagtctcaggagcagctccggtctccatagaggctgggtcagcagtgggcaaaacaacttcctttgctgggagctctgcttcctcctacagcccctcggaagccgccctcaagaacttcaccccttcagagacactgaccacggacatcgcaaccaaggggcccttccccaccagcagggaccctcttccttctgtccctccaactacaaccaacagcagccgagggacgaacagcaccttagccaagatcacaacctcagcgaagaccacgatgaagcccccaacagccacgcccacgactgcccggacgaggccgaccacagacatgagtgcaggtgaaaatggaggtttcctcctcctgcggctgagtgtggcttctccggaagacctcactgaccccagagtggcagaaaggctgatgcagcagctccaccgggaactccacgcccacgcgcctcacttccaggtctccttactgcgtgtcaggagaggc

SEQ ID NO: 4062 - DNA, 915 bp, Homo Sapiens
aatgagactagcacctctgccaacactggatccagtgtgatctccagtggagccagcacagccaccaactctgggtccagtgtgacctccagtggggtcagcacagccaccatctcagggtccagcgtgacctccaatggggtcagcatagtcaccaactctgagttccatacaacctccagtgggatcagcacagccaccaactctgagttcagcacagcgtccagtgggatcagcatagccaccaactctgagtccagcacaacctccagtggggccagcacagccaccaactctgagtccagcacaccctccagtggggccagcacagccaccaactctgactccagcacaacctccagtggggctagcacagccaccaactctgactccagcacaacctccagtgaggccagcacagccaccaactctgagtccagcacaacctccagtggggccagcacagccaccaactctgagtccagcacgacctccagtggggccagcacagccaccaactctgagtccagcacaacctccagtggggccagcacagccaccaactctgggtccagcacgacctccagtgggaccagcacagccaccaactctgagtccagcacagtgtccagtggggccagcacagccaccacctctgagtccagcacgacctccagtggggccagcacagccaccaactctgagtccagcacagtgtccagtggggccagcactgccaccaattctgagtccagcacaacctccagtggggccaacacagccaccaactctgggtccagtgtgacctctgcaggctctggaacagcagctctgactggaatgcacacaacttcccatagtgcatctactgcagtgagtgaggcgaagcctggtgggtccctggtgccgtgggaa

SEQ ID NO: 4063 - DNA, 1137 bp, Homo Sapiens
cccaggtgtctggggccccacggagagccagtgaaggtgggccacaccgtcggcatggactgccaggagtgcacgtgtgaggcggccacgtggacgctgacctgccgacccaagctctgcccgctgccccctgcctgccccctgcccggcttcgtgcctgtgcctgcagccccacaggccggccagtgctgcccccagtacagctgcgcctgcaacaccagccgctgccccgcgcccgtgggctgtcctgagggcgcccgcgcgatcccgacctaccaggagggggcctgctgcccagtccaaaactgcagctggacagtgtgcagcatcaacgggaccctgtaccagcccggcgccgtggtctcctcgagcctgtgcgaaacctgcaggtgtgagctgccgggtggccccccatcggacgcgtttgtggtcagctgtgagacccagatctgcaacacacactgccctgtgggcttcgagtaccaggagcagagcgggcagtgctgtggcacctgtgtgcaggtcgcctgtgtcaccaacaccagcaagagccccgcccacctcttctaccccggcgagacctggtcagacgcagggaaccactgtgtgacccaccagtgtgagaagcaccaggatgggctcgtggtggtcaccacgaagaaggcgtgccccccgctcagctgttctctggacgaggcccgcatgagcaaggacggctgctgccgcttctgcccgccgcccccgcccccgtaccagaaccagtcgacctgtgctgtgtaccataggagcctgatcatccagcagcagggctgcagctcctcggagcccgtgcgcctggcttactgccgggggaactgtggggacagctcttccatgtactcgctcgagggcaacacggtggagcacaggtgccagtgctgccaggagctgcggacctcgctgaggaatgtgaccctgcactgcaccgacggctccagccgggccttcagctacaccgaggtggaagagtgcggctgcatgggccggcggtgccctgcgccgggcgacacccagcactcggaggaggcggaacccgagcccagccaggaggcagagagtgggagctgggagagaggcgtcccagtgtcccccatgcac

SEQ ID NO: 4064 - DNA, 1158 bp, Homo Sapiens
cttccaaaagctcctgtcatcaccactcctcttgaaacagtggatgccttagttgaagaagtggctactttcatgtgtgcagtggaatcctacccccagcctgagatttcctggactagaaataaaattctcattaaactctttgacacccggtacagcatccgggagaatgggcagctcctcaccatcctgagtgtggaagacagtgatgatggcatttactgctgcacggccaacaatggtgtgggaggagctgtggagagttgtggagccctgcaagtgaagatgaaacctaaaataactcgtcctcccataaatgtgaaaataatagaaggattaaaagcagtcctaccatgtactacaatgggtaatcccaaaccatcagtgtcttggataaagggagacagccctctcagggaaaattcccgaattgcagttcttgaatctgggagcttgaggattcataacgtacaaaaggaagatgcaggacagtatcgatgtgtggcaaaaaacagcctcgggacagcatattccaaagtggtgaagctggaagttgaggaagaaagtgaacccgaacaagatactaaagtttttgccaggatcctgcgggctcctgaatcccacaatgtcacctttggctcctttgtgaccctgcactgtacagcaacaggcattcctgtccccaccatcacctggattgaaaacggaaatgctgtttcttctgggtccattcaagagagtgtgaaagaccgagtgattgactcaagactgcagctgtttatcaccaagccaggactctacacatgcatagctaccaataagcatggggagaagttcagtactgccaaggctgcagccaccatcagcatagcagaatggagagagtactgcttggcagtaaaggagctcttctgcgcaaaagaatggctggtaatggaagagaagacccacagaggactctacagatccgagatgcatttgctgtccgtgccagaatgcagcaagcttcccagcatgcattgggaccccacggcctgtgccagactgccacatctagcattcccaccaatgacgtcctcaaagccaagtgtggacattccaaatctgccttcctcctcctcttcttccttctctgtctcacctacatactccatgact

SEQ ID NO: 4065 - DNA, 966 bp, Homo Sapiens
gttctcctgcactcagggtcctcggtacccgccgctgctggcagctccgtggtgtccgagtccgcggtgagctgggaggcgggcgcccgggcggtgctgcgctgccagagcccgcgcatggtgtggacccaggaccggctgcacgaccgccagcgcgtgctccactgggacctgcgcggccccgggggtggccccgcgcggcgcctgctggacttgtactcggcgggcgagcagcgcgtgtacgaggcgcgggaccgcggccgcctggagctctcggcctcggccttcgacgacggcaacttctcgctgctcatccgcgcggtggaggagacggacgcggggctgtacacctgcaacctgcaccatcactactgccacctctacgagagcctggccgtccgcctggaggtcaccgacggccccccggccacccccgcctactgggacggcgagaaggaggtgctggcggtggcgcgcggcgcacccgcgcttctgacctgcgtgaaccgcgggcacgtgtggaccgaccggcacgtggaggaggctcaacaggtggtgcactgggaccggcagccgcccggggtcccgcacgaccgcgcggaccgcctgctggacctctacgcgtcgggcgagcgccgcgcctacgggcccctttttctgcgcgaccgcgtggctgtgggcgcggatgcctttgagcgcggtgacttctcactgcgtatcgagccgctggaggtcgccgacgagggcacctactcctgccacctgcaccaccattactgtggcctgcacgaacgccgcgtcttccacctgacggtcgccgaaccccacgcggagccgcccccccggggctctccgggcaacggctccagccacagcggcgccccaggcccagaccccacactggcgcgcggccacaacgtcatcaatgtcatcgtccccgagagccgagcccacttcttccagcag

SEQ ID NO: 4066 - DNA, 927 bp, Homo Sapiens
atggcgacctccacgggtcgctggcttctcctccggcttgcactattcggcttcctctgggaagcgtccggcggcctcgactcgggggcctcccgcgacgacgacttgctactgccctatccacgcgcgcgcgcgcgcctcccccgggactgcacacgggtgcgcgccggcaaccgcgagcacgagagttggcctccgcctcccgcgactcccggcgccggcggtctggccgtgcgcaccttcgtgtcgcacttcagggaccgcgcggtggccggccacctgacgcgggccgttgagcccctgcgcaccttctcggtgctggagcccggtgggcccggcggctgcgcggcgagacgacgcgccaccgtggaggagacggcgcgggcggccgactgccgtgtcgcccagaacggcggcttcttccgcatgaactcgggcgagtgcctggggaacgtggtgagcgacgagcggcgggtgagcagctccggggggctgcagaacgcgcagttcgggatccgccgcgacgggaccctggtcaccgggtacctgtctgaggaggaggtgctggacactgagaacccatttgtgcagctgctgagtggggtcgtgtggctgattcgtaatggaagcatctacatcaacgagagccaagccacagagtgtgacgagacacaggagacaggttcctttagcaaatttgtgaatgtgatatcagccaggacggccattggccacgaccggaaagggcagctggtgctctttcatgcagacggccaaacggagcagcgtggcatcaacctgtgggaaatggcggagttcctgctgaaacaggacgtggtcaacgccatcaacctggatgggggtggctctgccacctttgtgctcaacgggaccttggccagttacccgtcagatcactggcaggcg

SEQ ID NO: 4067 - DNA, 2097 bp, Homo Sapiens
ctgcaggtggatattgttcccagccagggggagatcagcgttggagagtccaaattcttcttatgccaagtggcaggagatgccaaagataaagacatctcctggttctcccccaatggagaaaagctcaccccaaaccagcagcggatctcagtggtgtggaatgatgattcctcctccaccctcaccatctataacgccaacatcgacgacgccggcatttacaagtgtgtggttacaggcgaggatggcagtgagtcagaggccaccgtcaacgtgaagatctttcagaagctcatgttcaagaatgcgccaaccccacaggagttccgggagggggaagatgccgtgattgtgtgtgatgtggtcagctccctcccaccaaccatcatctggaaacacaaaggccgagatgtcatcctgaaaaaagatgtccgattcatagtcctgtccaacaactacctgcagatccggggcatcaagaaaacagatgagggcacttatcgctgtgagggcagaatcctggcacggggggagatcaacttcaaggacattcaggtcattgtgaatgtgccacctaccatccaggccaggcagaatattgtgaatgccaccgccaacctcggccagtccgtcaccctggtgtgcgatgccgaaggcttcccagagcccaccatgagctggacaaaggatggggaacagatagagcaagaggaagacgatgagaagtacatcttcagcgacgatagttcccagctgaccatcaaaaaggtggataagaacgacgaggctgagtacatctgcattgctgagaacaaggctggcgagcaggatgcgaccatccacctcaaagtctttgcaaaacccaaaatcacatatgtagagaaccagactgccatggaattagaggagcaggtcactcttacctgtgaagcctccggagaccccattccctccatcacctggaggacttctacccggaacatcagcagcgaagaaaaggcttcgtggactcgaccagagaagcaagagactctggatgggcacatggtggtgcgtagccatgcccgtgtgtcgtcgctgaccctgaagagcatccagtacactgatgccggagagtacatctgcaccgccagcaacaccatcggccaggactcccagtccatgtaccttgaagtgcaatatgccccaaagctacagggccctgtggctgtgtacacttgggaggggaaccaggtgaacatcacctgcgaggtatttgcctatcccagtgccacgatctcatggtttcgggatggccagctgctgccaagctccaattacagcaatatcaagatctacaacaccccctctgccagctatctggaggtgaccccagactctgagaatgattttgggaactacaactgtactgcagtgaaccgcattgggcaggagtccttggaattcatccttgttcaagcagacaccccctcttcaccatccatcgaccaggtggagccatactccagcacagcccaggtgcagtttgatgaaccagaggccacaggtggggtgcccatcctcaaatacaaagctgagtggagagcagtgggtgaagaagtatggcattccaagtggtatgatgccaaggaagccagcatggagggcatcgtcaccatcgtgggcctgaagcccgaaacaacgtacgccgtaaggctggcggcgctcaatggcaaagggctgggtgagatcagcgcggcctccgagttcaagacgcagccagtccaaggggaacccagtgcacctaagctcgaagggcagatgggagaggatggaaactctattaaagtgaacctgatcaagcaggatgacggcggctcccccatcagacactatctggtcaggtaccgagcgctctcctccgagtggaaaccagagatcaggctcccgtctggcagtgaccacgtcatgctgaagtccctggactggaatgctgagtatgaggtctacgtggtggctgagaaccagcaaggaaaatccaaggcggctcattttgtgttcaggacctcggcccagcccacagccatcccagccaacggcagccccacctcaggc

SEQ ID NO: 4068 - DNA, 2034 bp, Homo Sapiens
cttcttcaagtgacaatttcacttagcaaagtagagcttagtgttggagaatctaaattcttcacatgtacagcgattggtgaacctgaaagtatagattggtataatcctcaaggagagaagataatttcaacacagagggtagtagtgcaaaaggaaggtgttaggtcacggttaaccatctacaatgcaaatatagaagatgcagggatatatcgttgtcaagcaacagatgccaaaggacaaacacaagaagctacagtagttttggaaatttaccaaaaactcactttcagagaagtggtatctccacaagaattcaaacaaggagaagatgcagaagtggtttgccgagttagcagttcacctgcacctgctgtcagctggttgtatcataatgaggaagtcaccactatttccgacaatcggttcgctatgttagcaaacaataacctgcagattctcaacatcaataaaagtgatgaaggtatatacagatgtgaaggaagagtggaggccaggggagaaattgacttccgtgatatcattgttattgttaatgtgccgccagcaatctcaatgcctcagaaatcttttaatgccacagcagagagaggagaagaaatgacattttcctgcagggcctcaggctctccagaacccgccatctcctggttcaggaatggcaagctcattgaagaaaatgagaagtacatattgaaagggagcaatacagaactcactgtcaggaacataatcaatagtgatggtggtccttatgtctgcagggccacaaataaggcaggagaagatgaaaagcaagctttcctccaagtctttgtacagcctcacataatacagcttaaaaatgaaactacatatgagaatggtcaagtcacactcgtatgtgatgcggaaggggagcctattccagaaatcacttggaaaagagctgtggatggcttcacgttcactgaaggcgataagagcctggacggccgtatcgaagtcaaagggcagcatggaagctcatcactgcatattaaagatgtgaagttgtcagattcagggagatatgactgtgaagctgcaagcagaattggagggcatcaaaagagcatgtaccttgatattgaatatgcccccaagtttatatcaaaccaaacaatttattactcttgggaaggaaatcctatcaatataagttgtgatgtgaaatcgaatccaccagcatcaattcactggagaagagataaattagtcttacctgctaaaaacacgaccaatttaaagacttatagtacaggaagaaagatgatattagagattgcacctacatctgacaatgactttggacgctataattgcacagccactaatcatataggaacaagatttcaagaatatattcttgctttggctgacgtgccatccagtccctatggagtgaagatcatagagctgtcgcagaccacggccaaggtttccttcaacaaaccggactcccatggaggtgtacctattcatcactatcaggtggatgtcaaagaagtagcgtcagaaatctggaaaattgtacgctcccatggagttcaaacaatggttgttttgaacaacctggaaccaaatacaacttatgaaatcagggttgcagctgtaaatggaaagggacaaggagactacagtaaaatagaaatcttccaaacattaccagttcgtgaaccaagtcctccatccatacatggacagccaagcagtggaaagagctttaaactcagcatcaccaaacaggacgatggaggggcccctattttggaatacattgtgaaatatagaagtaaagataaggaagaccaatggctagagaaaaaagtgcaaggaaataaagaccacatcattttggagcatctccagtggaccatggggtatgaagttcagattacagctgccaatagattgggatattctgaaccgacagtttatgaattcagcatgccaccaaagcccaacattattaaagacacgctgtttaat

SEQ ID NO: 4069 - DNA, 3897 bp, Homo Sapiens
gaacagggcacacaggatatcaccgatgccagcgaaagggggctccacatgcagaagctggggtctgggtcagtgcaggctgcgctggcggagctggtggccctgccctgtctctttaccctgcagccacggccaagcgcagcccgagatgcccctcggataaagtggaccaaggtgcggactgcgtcgggccagcgacaggacttgcccatcctggtggccaaggacaatgtcgtgagggtggccaaaagctggcagggacgagtgtcactgccttcctacccccggcgccgagccaacgccacgctacttctggggccactgagggccagtgactctgggctgtaccgctgccaggtggtgaggggcatcgaggatgagcaggacctggtgcccttggaggtgacaggtgttgtgttccactaccgatcagcccgggaccgctatgcactgaccttcgctgaggcccaggaggcctgccgtctcagctcagccatcattgcagcccctcggcatctacaggctgcctttgaggatggctttgacaactgtgatgctggctggctctctgaccgcactgttcggtatcctatcacccagtcccgtcctggttgctatggcgaccgtagcagccttccaggggttcggagctatgggaggcgcaacccacaggaactctacgatgtgtattgctttgcccgggagctggggggcgaggtcttctacgtgggcccggcccgccgcctgacactggccggcgcgcgtgcacagtgccgccgccagggtgccgcgctggcctcggtgggacagctgcacctggcctggcatgagggcctggaccagtgcgacccgggctggctggccgacggcagcgtgcgctacccgatccagacgccgcgccggcgctgcgggggcccagccccgggcgtgcgcaccgtctaccgcttcgctaaccggaccggcttcccctcacccgccgagcgcttcgacgcctactgcttccgagctcatcaccccacgtcacaacatggagacctagagaccccatcctctggggatgagggggagattctgtcagcagaggggcccccagttagagaactggagcccaccctggaggaggaagaggtggtcacccctgacttccaggagcctctggtgtccagtggggaagaagaaaccctgattttggaggagaagcaggagtctcaacagaccctcagccctacccctggggaccccatgctggcctcatggcccactggggaagtgtggctaagcacggtggcccccagccctagcgacatgggggcaggcactgcagcaagttcacacacggaggtggccccaactgaccctatgcctaggagaagggggcgcttcaaagggttgaatgggcgctacttccagcagcaggaaccggagccggggctgcaaggggggatggaggccagcgcccagccccccacctcagaggctgcagtgaaccaaatggagcctccgttggccatggcagtcacagagatgttgggcagtggccagagccggagcccctgggctgatctgaccaatgaggtggatatgcctggagctggttctgctggtggcaagagctccccagagccctggctgtggccccctaccatggtcccacccagcatctcaggccacagcagggcccctgtcctggagctagagaaagccgagggccccagtgccaggccagccaccccagacctgttttggtcccccttggaggccactgtctcagctcccagccctgccccctgggaggcattccctgtggccacctccccagatctccctatgatggccatgctgcgtggtcccaaagagtggatgctaccacaccccacccccatctccaccgaggccaatagagttgaggcacatggtgaggccaccgccacggctccaccctcccctgctgcagagaccaaggtgtattccctgcctctctctttgaccccaacaggacagggtggagaggccatgcccacaacacctgagtcccccagggcagacttcagagaaactggggagaccagccctgctcaggtcaacaaagctgagcactccagctccagcccatggccttctgtaaacaggaatgtggctgtaggttttgtccccactgagactgccactgagccaacgggcctcaggggtatcccggggtctgagtctggggtcttcgacacagcagaaagccccacttctggcttgcaggccactgtagatgaggtgcaggacccctggccctcagtgtacagcaaagggctggatgcaagttccccatctgcccccctggggagccctggagtcttcttggtacccaaagtcaccccaaatttggagccttgggttgctacagatgaaggacccactgtgaatcccatggattccacagtcacgccggcccccagtgatgctagtggaatttgggaacctggatcccaggtgtttgaagaagccgaaagcaccaccttgagccctcaggtggccctggatacaagcattgtgacgcccctcacgaccctggagcagggggacaaggttggagttccagccatgtctacactgggctcctcaagctcccaaccccacccagagccagaggatcaggtggagacccagggaacatcaggagcttcagtgcctccgcatcagagcagtcccctagggaaaccggctgttcctcctgggacaccgactgcagccagtgtgggcgagtctgcctcagtttcctcaggggagcctacggtaccgtgggacccctccagcaccctgctgcctgtcaccctgggcatagaggacttcgaactggaggtcctggcagggagcccgggtgtagagagcttctgggaggaggtggcaagtggagaggagccagccctgccagggacccctatgaatgcaggtgcggaggaggtgcactcagatccctgtgagaacaacccttgtcttcatggagggacatgtaatgccaatggcaccatgtatggctgtagctgtgatcagggcttcgccggggagaactgtgagattgacattgatgactgcctctgcagcccctgtgagaatggaggcacctgtattgatgaggtcaatggctttgtctgcctttgcctccccagctatgggggcagcttttgtgagaaagacaccgagggctgtgaccgcggctggcataagttccagggccactgttaccgctattttgcccaccggagggcatgggaagatgccgagaaggactgccgccgccgctccggccacctgaccagcgtccactcaccggaggaacacagcttcattaatagctttgggcatgaaaacacgtggatcggcctgaacgacaggatcgtggagagagatttccagtggacggacaacaccgggctgcaatttgagaactggcgagagaaccagccggacaatttcttcgcgggtggcgaggactgtgtggtgatggtggcgcatgaaagcgggcgctggaacgatgtcccctgcaactacaacctaccctatgtctgcaagaagggcacagtgctctgtggtccccctccggcagtggagaatgcctcactcatcggtgcccgcaaggccaagtacaatgtccatgccactgtaaggtaccagtgcaatgaaggatttgcccagcaccatgtggccaccattcgatgccggagcaatggcaagtgggacaggccccaaattgtctgcaccaaacccagacgttcacatcggatgcggcgacaccaccaccaccaccaacaccaccaccagcatcaccaccacaaatcccgcaaggagcgcagaaaacacaagaaacacccaacggaggactgggagaaggacgaagggaatttctgc

SEQ ID NO: 4070 - DNA, 708 bp, Homo Sapiens
cagcagcagactctcccaaaaccgttcatctgggccgagccccatttcatggttccaaaggaaaagcaagtgaccatctgttgccagggaaattatggggctgttgaataccagctgcactttgaaggaagcctttttgccgtggacagaccaaaaccccctgagcggattaacaaagtcaaattctacatcccggacatgaactcccgcatggcagggcaatacagctgcatctatcgggttggggagctctggtcagagcccagcaacttgctggatctggtggtaacagaaatgtatgacacacccaccctctcggttcatcctggacccgaagtgatctcgggagagaaggtgaccttctactgccgtctagacactgcaacaagcatgttcttactgctcaaggagggaagatccagccacgtacagcgcggatacgggaaggtccaggcggagttccccctgggccctgtgaccacagcccaccgagggacataccgatgttttggctcctataacaaccatgcctggtctttccccagtgagccagtgaagctcctggtcacaggcgacattgagaacaccagccttgcacctgaagaccccacctttcctgacacttggggcacctaccttttaaccacagagacgggactccagaaagaccatgccctctgggatcacactgcccagaatctccttcgg

SEQ ID NO: 4071 - DNA, 513 bp, Homo Sapiens
caaagtaaagcccaggttttacagagtgtggcaggacaaaccctaactgtaagatgccagtatcctccaacggggtctctatatgaaaagaagggctggtgtaaggaggcgtccgccttagtctgcatacgtctggtaacttcaagtaaaccaagaacgatggcatggacctcacgtttcaccatttgggacgatcccgatgctggtttctttactgtaaccatgacagacctaagagaagaagattccgggcactattggtgtcgtatctataggccgagcgacaattcagtatccaaatctgtgagattctatttggtggttagcccggcttctgcatcaacccagaccagttggacccccagagatttagtaagttctcagacgcaaactcaaagctgcgtcccaccgacagccggcgccaggcaggcgcccgaatcaccctctactatacccgtaccgtcccaaccccaaaattccactttgagacctgggccagctgccccaatagcg

SEQ ID NO: 4072 - DNA, 351 bp, Homo Sapiens
ctctgggtgtcccagccccctgagattcgtaccctggaaggatcctctgccttcctgccctgctccttcaatgccagccaagggagactggccattggctccgtcacgtggttccgagatgaggtggttccagggaaggaggtgaggaatggaaccccagagttcaggggccgcctggccccacttgcttcttcccgtttcctccatgaccaccaggctgagctgcacatccgggacgtgcgaggccatgacgccagcatctacgtgtgcagagtggaggtgctgggccttggtgtcgggacagggaatgggactcggctggtggtggagaaagaacatcctcagctaggg

SEQ ID NO: 4073 - DNA, 1647 bp, Homo Sapiens
cagaagttacccacccgggatgaggaactttttcagatgcagatccgggacaaggcattttttcatgattcgtcagtaattccagatggagctgaaattagcagttatctctttagagatacacctaaaaggtatttctttgtggttgaagaagacaatactccattatcagtcacagtgacgccctgtgatgcgcctttggagtggaagctgagcctccaggagctgccagaggacaggagcggggaaggctcaggtgatctggaacctcttgagcagcagaagcagcagatcattaatgaggaaggcactgagttattctcctacaaaggcaatgatgttgagtattttatatcgtctagttccccatccggtttatatcagttggatcttctttcaacagagaaagacacacatttcaaagtatatgccaccacaactccagaatctgatcagccataccctgagttaccctatgacccaagagtagatgtgacctcactggggcgcaccacggtcactttggcctggaaaccaagccccactgcctctttgctgaaacaacccattcagtactgtgtggtcatcaacaaagagcacaatttcaaaagtctctgtgcagtggaagcaaaactgagtgcagatgatgcttttatgatggcaccgaaacctggtctggacttcagcccctttgactttgcccactttggatttccttctgataattcaggtaaagaacgcagtttccaggcaaagccttctccaaaactggggcgtcatgtctactccaggcccaaggttgatattcagaaaatctgcataggaaacaagaacatcttcaccgtctctgatctgaaacccgacacgcagtactactttgacgtatttgtggtcaacatcaacagcaacatgagcaccgcttatgtaggtacctttgccaggaccaaggaagaagccaaacagaagacagtcgagctcaaagatgggaagataacagatgtatttgttaaaaggaagggagcaaagtttctacggtttgctccagtctcttctcaccaaaaagtcaccttctttattcactcttgtctggatgctgtccaaatccaagtgagaagagatgggaaacttcttctgtctcagaatgtggaaggcattcagcagtttcagcttagaggaaaacctaaagctaaatacctcgttcgactgaaaggaaacaagaaaggagcatctatgttgaaaattctagctaccacaaggcctactaagcagtcatttccctctcttcctgaagacacaagaatcaaagcctttgacaagctccgtacctgttcctcggccaccgtggcttggctaggcactcaggaaaggaacaagttttgcatctacaaaaaagaagtggatgataactacaatgaagaccagaagaaaagagagcaaaaccaatgtctaggaccagatataaggaagaagtcagaaaaggtcctctgtaaatatttccacagtcaaaacctgcagaaagcagtgaccacagaaacaattaaaggtcttcagcctggcaaatcttacctgctggatgtttatgtcataggacatggggggcactctgtaaagtatcagagtaaggttgtgaaaactagaaagttctgt

SEQ ID NO: 4074 - DNA, 588 bp, Homo Sapiens
atgcaggtgcatctaactgtgcaagttcctcctaagatatatgacatctcaaatgatatgaccgtcaatgaaggaaccaacgtcactcttacttgtttggccactgggaaaccagagccttccatttcttggcgacacatctccccatcagcaaaaccatttgaaaatggacaatatttggacatttatggaattacaagggaccaggctggggaatatgaatgcagtgcggaaaatgatgtgtcattcccagatgtgaggaaagtaaaagttgttgtcaactttgctcctactattcaggaaattaaatctggcaccgtgacccccggacgcagtggcctgataagatgtgaaggtgcaggtgtgccgcctccagcctttgaatggtacaaaggagagaagaagctcttcaatggccaacaaggaattattattcaaaattttagcacaagatccattctcactgttaccaacgtgacacaggagcacttcggcaattatacttgtgtggctgccaacaagctaggcacaaccaatgcgagcctgcctcttaaccctccaagtacagcccagtatggaattaccggg

SEQ ID NO: 4075 - DNA, 2367 bp, Homo Sapiens
tttgggatggaccctgaccttcagatggatatcgtcaccgagcttgaccttgtgaacaccacccttggagttgctcaggtgtctggaatgcacaatgccagcaaagcatttttatttcaagacatagaaagagagatccatgcagctcctcatgtgagtgagaaattaattcagctgttccagaacaagagtgaattcaccattttggccactgtacagcagaagccatccacttcaggagtgatactgtccattcgagaactggagcacagctattttgaactggagagcagtggcctgagggatgagattcggtatcactacatacacaatgggaagccaaggacagaggcacttccttaccgcatggcagatggacaatggcacaaggttgcactgtcagttagcgcctctcatctcctgctccatgtcgactgtaacaggatttatgagcgtgtgatagaccctccagataccaaccttcccccaggaatcaatttatggcttggccagcgcaaccaaaagcatggcttattcaaagggatcatccaagatgggaagatcatctttatgccgaatggatatataacacagtgtccaaatctaaatcacacttgcccaacctgcagtgatttcttaagcctggtgcaaggaataatggatttacaagagcttttggccaagatgactgcaaaactaaattatgcagagacaagacttagtcaattggaaaactgtcattgtgagaagacttgtcaagtgagtggactgctctatcgagatcaagactcttgggtagatggtgaccattgcaggaactgcacttgcaaaagtggtgccgtggaatgccgaaggatgtcctgtccccctctcaattgctccccagactccctcccagtgcacattgctggccagtgctgtaaggtctgccgaccaaaatgtatctatggaggaaaagttcttgcagaaggccagcggattttaaccaagagctgtcgggaatgccgaggtggagttttagtaaaaattacagaaatgtgtcctcctttgaactgctcagaaaaggatcacattcttcctgagaatcagtgctgccgtgtctgtagaggtcataacttttgtgcagaaggacctaaatgtggtgaaaactcagagtgcaaaaactggaatacaaaagctacttgtgagtgcaagagtggttacatctctgtccagggagactctgcctactgtgaagatattgatgagtgtgcagctaagatgcattactgtcatgccaatactgtgtgtgtcaaccttcctgggttatatcgctgtgactgtgtcccaggatacattcgtgtggatgacttctcttgtacagaacacgatgaatgtggcagcggccagcacaactgtgatgagaatgccatctgcaccaacactgtccagggacacagctgcacctgcaaaccgggctacgtggggaacgggaccatctgcagagctttctgtgaagagggctgcagatacggtggaacgtgtgtggctcccaacaaatgtgtctgtccatctggattcacaggaagccactgcgagaaagatattgatgaatgttcagagggaatcattgagtgccacaaccattcccgctgcgttaacctgccagggtggtaccactgtgagtgcagaagcggtttccatgacgatgggacctattcactgtccggggagtcctgtattgacattgatgaatgtgccttaagaactcacacctgttggaacgattctgcctgcatcaacctggcagggggttttgactgtctctgcccctctgggccctcctgctctggtgactgtcctcatgaaggggggctgaagcacaatggccaggtgtggaccttgaaagaagacaggtgttctgtctgctcctgcaaggatggcaagatattctgccgacggacagcttgtgattgccagaatccaagtgctgacctattctgttgcccagaatgtgacaccagagtcacaagtcaatgtttagaccaaaatggtcacaagctgtatcgaagtggagacaattggacccatagctgtcagcagtgtcggtgtctggaaggagaggtagattgctggccactcacttgccccaacttgagctgtgagtatacagctatcttagaaggggaatgttgtccccgctgtgtcagtgacccctgcctagctgataacatcacctatgacatcagaaaaacttgcctggacagctatggtgtttcacggcttagtggctcagtgtggacgatggctggatctccctgcacaacctgtaaatgcaagaatggaagagtctgttgttctgtggattttgagtgtcttcaaaataat

SEQ ID NO: 4076 - DNA, 2385 bp, Homo Sapiens
cttggtgtggacccttccctacagattgacgtcttaacagagttagaacttggggagtccacgaccggagtgcgtcaggtcccggggctgcataatgggacgaaagcctttctctttcaagatactcccagaagcataaaagcatccactgctacagctgaacagttttttcagaagctgagaaataaacatgaatttactattttggtgaccctaaaacagacccacttaaattcaggagttattctctcaattcaccacttggatcacaggtacctggaactggaaagtagtggccatcggaatgaagtcagactgcattaccgctcaggcagtcaccgccctcacacagaagtgtttccttacattttggctgatgacaagtggcacaagctctccttagccatcagtgcttcccatttgattttacacattgactgcaataaaatttatgaaagggtagtagaaaagccctccacagacttgcctctaggcacaacattttggctaggacagagaaataatgcgcatggatattttaagggtataatgcaagatgtccaattacttgtcatgccccagggatttattgctcagtgcccagatcttaatcgcacctgtccaacttgcaatgacttccatggacttgtgcagaaaatcatggagctacaggatattttagccaaaacatcagccaagctgtctcgagctgaacagcgaatgaatagattggatcagtgctattgtgaaaggacttgcaccatgaagggaaccacctaccgagaatttgagtcctggatagacggctgtaagaactgcacatgcctgaatggaaccatccagtgtgaaactctaatctgcccaaatcctgactgcccacttaagtcggctcttgcgtatgtggatggcaaatgctgtaaggaatgcaaatcgatatgccaatttcaaggacgaacctactttgaaggagaaagaaatacagtctattcctcttctggagtatgtgttctctatgagtgcaaggaccagaccatgaaacttgttgagagttcaggctgtccagctttggattgtccagagtctcatcagataaccttgtctcacagctgttgcaaagtttgtaaaggttatgacttttgttctgaaaggcataactgcatggagaattccatctgcagaaatctgaatgacagggctgtttgtagctgtcgagatggttttagggctcttcgagaggataatgcctactgtgaagacatcgatgagtgtgctgaagggcgccattactgtcgtgaaaatacaatgtgtgtcaacaccccgggttcttttatgtgcatctgcaaaactggatacatcagaattgatgattattcatgtacagaacatgatgagtgtatcacaaatcagcacaactgtgatgaaaatgctttatgcttcaacactgttggaggacacaactgtgtttgcaagccgggctatacagggaatggaacgacatgcaaagcattttgcaaagatggctgtaggaatggaggagcctgtattgccgctaatgtgtgtgcctgcccacaaggcttcactggacccagctgtgaaacggacattgatgaatgctctgatggttttgttcaatgtgacagtcgtgctaattgcattaacctgcctggatggtaccactgtgagtgcagagatggctaccatgacaatgggatgttttcaccaagtggagaatcgtgtgaagatattgatgagtgtgggaccgggaggcacagctgtgccaatgataccatttgcttcaatttggatggcggatatgattgtcgatgtcctcatggaaagaattgcacaggggactgcatccatgatggaaaagttaagcacaatggtcagatttgggtgttggaaaatgacaggtgctctgtgtgctcatgtcagaatggattcgttatgtgtcgacggatggtctgtgactgtgagaatcccacagttgatcttttttgctgccctgaatgtgacccaaggcttagtagtcagtgcctccatcaaaatggggaaactttgtataacagtggtgacacctgggtccagaattgtcaacagtgccgctgcttgcaaggggaagttgattgttggcccctgccttgcccagatgtggagtgtgaattcagcattctcccagagaatgagtgctgcccgcgctgtgtcacagacccttgccaggctgacaccatccgcaatgacatcaccaagacttgcctggacgaaatgaatgtggttcgcttcaccgggtcctcttggatcaaacatggcactgagtgtactctctgccagtgcaagaatggccacatctgttgctcagtggatccacagtgccttcaggaactg

SEQ ID NO: 4077 - DNA, 3216 bp, Homo Sapiens
gccaggagcggctccgcgccgcagtccccaggagccagcattcgaacgttcactccattttattttctggtggagccggtggatacactctcagttagaggctcttctgttatattaaactgttcagcatattctgagccttctccaaaaattgaatggaaaaaagatggaacttttttaaacttagtatcagatgatcgacgccagcttctcccggatggatctttatttatcagcaatgtggtgcattccaaacacaataaacctgatgaaggttattatcagtgtgtggccactgttgagagtcttggaactattatcagtagaacagcgaagctcatagtagcaggtcttccaagatttaccagccaaccagaaccttcctcagtttatgctgggaacaatgcaattctgaattgtgaagttaatgcagatttggtcccatttgtgaggtgggaacagaacagacaaccccttcttctggatgatagagttatcaaacttccaagtggaatgctggttatcagcaatgcaactgaaggagatggcgggctttatcgctgcgtagtggaaagtggtgggccaccaaagtatagtgatgaagttgaattgaaggttcttccagatcctgaggtgatatcagacttggtatttttgaaacagccttctcccttagtcagagtcattggtcaggatgtagtgttgccatgtgttgcttcaggacttcctactccaaccattaaatggatgaaaaatgaggaggcacttgacacagaaagctctgaaagattggtattgctggcaggtggtagcctggagatcagtgatgttactgaggatgatgctgggacttatttttgtatagctgataatggaaatgagacaattgaagctcaagcagagcttacagtgcaagctcaacctgaattcctgaagcagcctactaatatatatgctcacgaatctatggatattgtatttgaatgtgaagtgactggaaaaccaactccaactgtgaagtgggtcaaaaatggggatatggttatcccaagtgattattttaagattgtaaaggaacataatcttcaagttttgggtctggtgaaatcagatgaagggttctatcagtgcattgctgaaaatgatgttggaaatgcacaagctggagcccaactgataatccttgaacatgcaccagccacaacgggaccactgccttcagctcctcgggatgtcgtggcctccctggtctctacccgcttcatcaaattgacgtggcggacacctgcatcagatcctcacggagacaaccttacctactctgtgttctacaccaaggaagggattgctagggaacgtgttgagaataccagtcacccaggagagatgcaagtaaccattcaaaacctaatgccagcgaccgtgtacatctttagagttatggctcaaaataagcatggctcaggagagagttcagctccactgcgagtagaaacacaacctgaggttcagctccctggcccagcacctaaccttcgtgcatatgcagcttcgcctacctccatcactgttacgtgggaaacaccagtgtctggcaatggggaaattcagaattataaattgtactacatggaaaaggggactgataaagaacaggatgttgatgtttcaagtcactcttacaccattaatgggttgaaaaaatatacagagtatagtttccgagtggtggcctacaataaacatggtcctggagtttccacaccagatgttgctgttcgaacattgtcagatgttcccagtgctgctcctcagaatctgtccttggaagtgagaaattcaaagagtattatgattcactggcagccacctgctccagccacacaaaatgggcagattactggctacaagattcgctaccgaaaggcctcccgaaagagtgatgtcactgagaccttggtaagcgggacacagctgtctcagctgattgaaggtcttgatcgggggactgagtataatttccgagtggctgctctaacaatcaatggtacaggcccggcaactgactggctgtctgctgaaacttttgaaagtgacctagatgaaactcgtgttcctgaagtgcctagctctcttcacgtacgcccgctcgttactagcatcgtagtgagctggactcctccagagaatcagaacattgtggtcagaggttacgccattggttatggcattggcagccctcatgcccagaccatcaaagtggactataaacagcgctattacaccattgaaaatctggatcccagctctcactatgtgattaccctgaaagcatttaataacgtgggtgaaggcatccccctgtatgagagtgctgtgaccaggcctcacacagacacttctgaagttgatttatttgttattaatgctccatacactccagtgccagatcccactcccatgatgccaccagtgggagttcaggcttccattctgagtcatgacaccatcaggattacgtgggcagacaactcgctgcccaagcaccagaagattacagactcccgatactacaccgtccgatggaaaaccaacatcccagcaaacaccaagtacaagaatgcaaatgcaaccactttgagttatttggtgactggtttaaagccgaatacactctatgaattctctgtgatggtgaccaaaggtcgaagatcaagtacatggagtatgacagcccatgggaccacctttgaattagttccgacttctccacccaaggatgtgactgttgtgagtaaagaggggaaacctaagaccataattgtgaattggcagcctccctccgaagccaatggcaaaattacaggttacatcatatattacagtacagatgtgaatgcagagatacatgactgggttattgagcctgttgtgggaaacagactgactcaccagatacaagagttaactcttgacacaccatactacttcaaaatccaggcacggaactcaaagggcatgggacccatgtctgaagctgtccaattcagaacacctaaagcggactcctctgataaaatgcctaatgatcaagcctcagggtctggagggaaaggaagccggctgccagacctaggatccgactacaaacctccaatgagcggcagtaacagccctcatgggagccccacctctcctctggacagtaatatgctg

SEQ ID NO: 4078 - DNA, 363 bp, Homo Sapiens
cagtcagtgacccacaccggcctgcccatcatggcctccctggccaacacagctatctccttcagctgcaggatcacctatccatacactccccaattcaaggttttcacagtcagctactttcatgaagatctccagggacagaggagccctaagaagccaacaaactgccaccctggactgggcacagagaaccagagccacaccctggactgccaggtcacccttgtgctgccgggagcatcggccactggcacctactactgctctgtccactggccacactccacggtgagaggcagcggcaccttcatcctggtcagagacgcagggtaccgagagcccccgcagagtccacagaag

SEQ ID NO: 4079 - DNA, 3258 bp, Homo Sapiens
atcgaaattcctatggatccaagcattcagaatgagctgacgcagccgccaaccatcaccaagcagtcagcgaaggatcacatcgtggacccccgtgataacatcctgattgagtgtgaagcaaaagggaaccctgcccccagcttccactggacacgaaacagcagattcttcaacatcgccaaggacccccgggtgtccatgaggaggaggtctgggaccctggtgattgacttccgcagtggcgggcggccggaggaatatgagggggaatatcagtgcttcgcccgcaacaaatttggcacggccctgtccaataggatccgcctgcaggtgtctaaatctcctctgtggcccaaggaaaacctagaccctgtcgtggtccaagagggcgctcctttgacgctccagtgcaaccccccgcctggacttccatccccggtcatcttctggatgagcagctccatggagcccatcacccaagacaaacgtgtctctcagggccataacggagacctatacttctccaacgtgatgctgcaggacatgcagaccgactacagttgtaacgcccgcttccacttcacccacaccatccagcagaagaaccctttcaccctcaaggtcctcaccacccgaggagttgcagaaagaacaccaagcttcatgtatccccagggcaccgcgagcagccagatggtgcttcgtggcatggacctcctgctggaatgcatcgcctccggggtcccaacaccagacatcgcatggtacaagaaaggtggggacctcccatctgataaggccaagtttgagaactttaataaggccctgcgtatcacaaatgtctctgaggaagactccggggagtatttctgcctggcctccaacaagatgggcagcatccggcacacgatctcggtgagagtaaaggctgctccctactggctggacgaacccaagaaccttattctggctcctggcgaggatgggagactggtgtgtcgagccaatggaaaccccaaacccactgtccagtggatggtgaatggggaacctttgcaatcggcaccacctaacccaaaccgtgaggtggccggagacaccatcatcttccgggacacccagatcagcagcagggctgtgtaccagtgcaacacctccaacgagcatggctacctgctggccaacgcctttgtcagtgtgctggatgtgccgcctcggatgctgtcgccccggaaccagctcattcgagtgattctttacaaccggacgcggctggactgccctttctttgggtctcccatccccacactgcgatggtttaagaatgggcaaggaagcaacctggatggtggcaactaccatgtttatgagaacggcagtctggaaattaagatgatccgcaaagaggaccagggcatctacacctgtgtcgccaccaacatcctgggcaaagctgaaaaccaagtccgcctggaggtcaaagaccccaccaggatctaccggatgcccgaggaccaggtggccagaaggggcaccacggtgcagctggagtgtcgggtgaagcacgacccctccctgaaactcaccgtctcctggctgaaggatgacgagccgctctatattggaaacaggatgaagaaggaagacgactccctgaccatctttggggtggcagagcgggaccagggcagttacacgtgtgtcgccagcaccgagctagaccaagacctggccaaggcctacctcaccgtgctagctgatcaggccactccaactaaccgtttggctgccctgcccaaaggacggccagaccggccccgggacctggagctgaccgacctggccgagaggagcgtgcggctgacctggatccccggggatgctaacaacagccccatcacagactacgtcgtccagtttgaagaagaccagttccaacctggggtctggcatgaccattccaagtaccccggcagcgttaactcagccgtcctccggctgtccccgtatgtcaactaccagttccgtgtcattgccatcaacgaggttgggagcagccaccccagcctcccatccgagcgctaccgaaccagtggagcaccccccgagtccaatcctggtgacgtgaagggagaggggaccagaaagaacaacatggagatcacgtggacgcccatgaatgccacctcggcctttggccccaacctgcgctacattgtcaagtggaggcggagagagactcgagaggcctggaacaacgtcacagtgtggggctctcgctacgtggtggggcagaccccagtctacgtgccctatgagatccgagtccaggctgaaaatgacttcgggaagggccctgagccagagtccgtcatcggttactccggagaagatttacccagtgcccctaggcgtttccgagtccggcagcccaacctggagacaatcaacctggaatgggatcatcctgagcatccaaatgggatcatgattggatacactctcaaatatgtggcctttaacgggaccaaagtaggaaagcagatagtggaaaacttctctcccaatcagaccaagttcacggtgcaaagaacggaccccgtgtcacgctaccgctttaccctcagcgccaggacgcaggtgggctctggggaagccgtcacagaggagtcaccagcacccccgaatgaagctactccaaccgcagctcctcccacattgcccccgactaccgtgggtgcgacgggcgctgtgagcagtaccgatgctactgccattgctgccaccaccgaagccacaacagtccccatcatcccaactgtcgcacctaccaccatcgccaccaccaccaccgtcgccacaactactacaaccactgctgccgccaccaccaccacggagagtcctcccaccaccacctccgggactaagatacacgaatccgcccctgatgagcagtccatatggaacgtcacggtgctccccaacagtaaatgggccaacatcacctggaagcacaatttcgggcccggaactgactttgtggttgagtacatcgacagcaaccatacgaaaaaaactgtcccagttaaggcccaggctcagcctatacagctgacagacctctatcccgggatgacatacacgttgcgggtttattcccgggacaacgagggcatcagcagtaccgtcatcacctttatgaccagtacagcttacaccaacaaccaagcagacatcgccacccagggctgg

SEQ ID NO: 4080 - DNA, 360 bp, Homo Sapiens
tcatcatcccatcccatcttccacaggggcgaattctcggtgtgtgacagtgtcagcgtgtgggttggggataagaccaccgccacagacatcaagggcaaggaggtgatggtgttgggagaggtgaacattaacaacagtgtattcaaacagtacttttttgagaccaagtgccgggacccaaatcccgttgacagcgggtgccggggcattgactcaaagcactggaactcatattgtaccacgactcacacctttgtcaaggcgctgaccatggatggcaagcaggctgcctggcggtttatccggatagatacggcctgtgtgtgtgtgctcagcaggaaggctgtgagaagagcc

SEQ ID NO: 4081 - DNA, 666 bp, Homo Sapiens
aaggaggcatgtcccacgggattatacacccactcaggcgaatgctgcaaggcatgcaatctaggcgaaggcgtggcgcaaccctgcggtgccaatcaaacggtttgtgaaccgtgtctggattcagtcaccttctctgatgttgttagcgccacagagccgtgcaagccctgcactgagtgcgtgggcctacaaagtatgtccgcgccttgcgtagaggccgatgatgctgtctgccgttgcgcttatggctattatcaagatgaaacaacgggccgttgcgaagcatgccgtgtctgtgaagcaggtagtggactggtatttagttgccaggataagcaaaatacggtctgcgaagaatgtccggacggcacctacagcgatgaggccaatcatgttgacccctgtctgccgtgtaccgtctgtgaggataccgagaggcaacttagggaatgcacgaggtgggctgacgcagaatgtgaggagataccgggcaggtggatcaccaggagcaccccccctgagggttcagattctacggcaccctccactcaggagcctgaggctccccctgagcaggatcttatcgccagtaccgttgccggcgtagttacaaccgtcatggggtccagccaaccagtcgttacacgtggaacaacggataac

SEQ ID NO: 4082 - DNA, 2187 bp, Homo Sapiens
tcccgccagacgtgtgctaacaacagacaccagtgctcggtgcacgcagagtgcagggactacgccacgggcttctgctgcagctgtgtcgctggctatacgggcaatggcaggcaatgtgttgcagaaggttccccccagcgagtcaatggcaaggtgaaaggaaggatctttgtggggagcagccaggtccccattgtctttgagaacactgacctccactcttacgtagtaatgaaccacgggcgctcctacacagccatcagcaccattcccgagaccgttggatattctctgcttccactggccccagttggaggcatcattggatggatgtttgcagtggagcaggacggattcaagaatgggttcagcatcaccgggggtgagttcactcgccaggctgaggtgaccttcgtggggcacccgggcaatctggtcattaagcagcggttcagcggcatcgatgagcatgggcacctgaccatcgacacggagctggagggccgcgtgccgcagattccgttcggctcctccgtgcacattgagccctacacggagctgtaccactactccacctcagtgatcacttcctcctccacccgggagtacacggtgactgagcccgagcgagatggggcatctccttcacgcatctacacttaccagtggcgccagaccatcaccttccaggaatgcgtccacgatgactcccggccagccctgcccagcacccagcagctctcggtggacagcgtgttcgtcctgtacaaccaggaggagaagatcttgcgctatgctctcagcaactccattgggcctgtgagggaaggctcccctgatgctcttcagaatccctgctacatcggcactcatgggtgtgacaccaacgcggcctgtcgccctggtcccaggacacagttcacctgcgagtgctccatcggcttccgaggagacgggcgaacctgctatgaggtggagaaaacccggtgccagcacgagcgagaacacattctcggggcggcgggggcgacagacccacagcgacccattcctccggggctgttcgttcctgagtgcgatgcgcacgggcactacgcgcccacccagtgccacggcagcaccggctactgctggtgcgtggatcgcgacggccgcgaggtggagggcaccaggaccaggcccgggatgacgcccccgtgtctgagtacagtggctcccccgattcaccaaggacctgcggtgcctaccgccgtgatccccttgcctcctgggacccatttactctttgcccagactgggaagattgagcgcctgcccctggagggaaataccatgaggaagacagaagcaaaggcgttccttcatgtcccggctaaagtcatcattggactggcctttgactgcgtggacaagatggtttactggacggacatcactgagccttccattgggagagctagtctacatggtggagagccaaccaccatcattagacaagatcttggaagtccagaaggtatcgctgttgatcaccttggccgcaacatcttctggacagactctaacctggatcgaatagaagtggcgaagctggacggcacgcagcgccgggtgctctttgagactgacttggtgaatcccagaggcattgtaacggattccgtgagagggaacctttactggacagactggaacagagataaccccaagattgaaacttcctacatggacggcacgaaccggaggatccttgtgcaggatgacctgggcttgcccaatggactgaccttcgatgcgttctcatctcagctctgctgggtggatgcaggcaccaatcgggcggaatgcctgaaccccagtcagcccagcagacgcaaggctctcgaagggctccagtatccttttgctgtgacgagctacgggaagaatctgtatttcacagactggaagatgaattccgtggttgctctcgatcttgcaatttccaaggagacggatgctttccaaccccacaagcagacccggctgtatggcatcaccacggccctgtctcagtgtccgcaaggccataactactgctcagtgaacaatggcggctgcacccacctatgcttggccaccccagggagcaggacctgccgttgccctgacaacaccttgggagttgactgtatcgaacagaaa

SEQ ID NO: 4083 - DNA, 2817 bp, Homo Sapiens
ctgcacccagacgagctcttcccacacggggagtcgtggggggaccagctcctgcaggaaggcgacgacgaaagctcagccgtggtgaagctggcgaatcccctgcacttctacgaagcccgattcagcaacctctacgtgggcaccaacggcatcatctccactcaggacttccccagggaaacgcagtatgtggactatgatttccccaccgacttcccggccatcgccccttttctggcggacatcgacacgagccacggcagaggccgagtcctgtaccgagtgaatgggaaagtgagtggccacctccacgtgggccatacacccgtgcacttcactgatgtggacctgcatgcgtatatcgtgggcaatgatggcagagcctacacggccatcagccacatcccacagccagcagcccaggccctcctccccctcacaccaattggaggcctgtttggctggctctttgctttagaaaaacctggctctgagaacggcttcagcctcgcaggtgctgcctttacccatgacatggaagttacattctacccgggagaggagacggttcgtatcactcaaactgctgagggacttgacccagagaactacctgagcattaagaccaacattcaaggccaggtgccttacgtcccagcaaatttcacagcccacatctctccctacaaggagctgtaccactactccgactccactgtgacctctacaagttccagagactactctctgacttttggtgcaatcaaccaaacatggtcctaccgcatccaccagaacatcacttaccaggtgtgcaggcatgcccccagacacccgtccttccccaccacccagcagctgaacgtggaccgggtctttgccttgtataatgacgaagaaagagtgcttagatttgctgtgaccaatcaaattggcccggtcaaagaagattcagaccccactccggtgaatccttgctatgatgggagccacatgtgtgacacaacagcacggtgccatccagggacaggtgtagattacacctgtgagtgcgcatctgggtaccagggagatggacggaactgtgtggatgaaaatgaatgtgcaactggctttcatcgctgtggccccaactctgtatgtatcaacttgcctggaagctacaggtgtgagtgccggagtgcttatgagtttgcagatgaccggcatacttgcatcttgatcaccccacctgccaacccctgtgaggatggcagtcatacctgtgctcctgctgggcaggcccggtgtgttcaccatggaggcagcacgttcagctgtgcctgcctgcctggttatgccggcgatgggcaccagtgcactgatgtagatgaatgctcagaaaacagatgtcaccctgcagctacctgctacaatactcctggttccttctcctgccgttgtcaacccggatattatggggatggatttcagtgcatacctgactccacctcaagcctgacaccctgtgaacaacagcagcgccatgcccaggcccagtatgcctaccctggggcccggttccacatcccccaatgcgacgagcagggcaacttcctgcccctacagtgtcatggcagcactggtttctgctggtgcgtggaccctgatggtcatgaagttcctggtacccagactccacctggctccaccccgcctcactgtggaccatcaccagagcccacccagaggcccccgaccatctgtgagcgctggagggaaaacctgctggagcactacggtggcaccccccgggatgaccagtacgtgccccagtgcgatgacctgggccacttcatccccctgcagtgccacggaaagagcgacttctgctggtgtgtggacaaagatggcagagaggtgcagggcacccgctcccagccaggcaccacccctgcgtgtatacccaccgtcgctccacccatggtccggcccacgccccggccagatgtgacccctccatctgtgggcaccttcctgctctatactcagggccagcagattggctacttacccctcaatggcaccaggcttcagaaggatgcagctaagaccctgctgtctctgcatggctccataatcgtgggaattgattacgactgccgggagaggatggtgtactggacagatgttgctggacggacaatcagccgtgccggtctggaactgggagcagagcctgagacgatcgtgaattcaggtctgataagccctgaaggacttgccatagaccacatccgcagaacaatgtactggacggacagtgtcctggataagatagagagcgccctgctggatggctctgagcgcaaggtcctcttctacacagatctggtgaatccccgtgccatcgctgtggatccaatccgaggcaacttgtactggacagactggaatagagaagctcctaaaattgaaacgtcatctttagatggagaaaacagaagaattctgatcaatacagacattggattgcccaatggcttaacctttgaccctttctctaaactgctctgctgggcagatgcaggaaccaaaaaactggagtgtacactacctgatggaactggacggcgtgtcattcaaaacaacctcaagtaccccttcagcatcgtaagctatgcagatcacttctaccacacagactggaggagggatggtgttgtatcagtaaataaacatagtggccagtttactgatgagtatctcccagaacaacgatctcacctctacgggataactgcagtctacccctactgcccaacaggaagaaag

SEQ ID NO: 4084 - DNA, 1899 bp, Homo Sapiens
cagtatccagttgtcaacacaaattatggtaaaatccagggcctaagaacaccattacccagtgagatcttgggtccagtggagcagtacttaggggtcccctatgcctcacccccaactggagagaggcggtttcagccaccagaatccccatcctcctggactggcatccgaaatgctactcagttttctgctgtgtgcccccagcacctggatgaaagattcttattgcatgacatgctgcccatctggtttaccaccagtttggatactttgatgacctatgttcaagatcaaaatgaagactgcctttacttaaacatctatgtgcccatggaagatgatattcatgaacagaacagtaagaagcctgttatggtctatatccatgggggatcttacatggagggaaccggtaacatgattgatggcagcattttggccagctatgggaacgtcatcgttatcaccattaactaccgtctgggaatactagggtttttaagtaccggtgaccaggcagcaaaaggcaactatgggctcctggatcagattcaagcactgaggtggattgaggagaatgtcggagcctttggcggggaccccaagagagtgactatctttggctcgggggctggggcctcctgtgtcagcctgttgaccctgtcccactactcagaaggtctcttccagaaggccatcattcagagcggcactgccctgtccagctgggcagtgaactaccagccggccaagtacactcggatattggcagacaaggtcggctgcaacatgctggacaccacggacatggtagaatgtctgaagaacaagaactacaaggagctcatccagcagaccatcaccccggccacctaccacatagcctttgggccggtgatcgacggcgacgtcatcccagacgacccccagatcctgatggagcaaggcgagttcctcaactacgacatcatgctgggcgtcaaccaaggggaaggcctgaagttcgtggacggcatcgtggataacgaggacggtgtgacgcccaacgactttgacttctccgtgtccaacttcgtggacaacctttacggctaccctgaagggaaagacactttgcgggagactatcaagttcatgtacacagactgggccgataaggaaaacccggagacgcggcggaaaaccctggtggctctctttactgaccatcagtgggtggcccccgccgtggccaccgccgacctgcacgcgcagtacggctcccccacctacttctatgccttctatcatcactgccaaagcgaaatgaagcccagctgggcagattcggcccatggcgatgaagtcccctatgtcttcggcatccccatgatcggtcccacagagctcttcagttgtaatttctccaagaacgacgtcatgctcagtgccgtggtgatgacctactggacgaacttcgccaaaactggtgatccaaaccaaccagttcctcaggataccaagttcattcatacaaaacccaatcgctttgaagaagtggcctggtccaagtataatcccaaagaccagctctatctgcatattggcttgaaacccagagtgagagatcactaccgggcaacgaaagtggctttctggttggaattggttcctcatttgcacaacttgaacgagatattccagtatgtttcaacaaccacaaaggttcctccaccagacatgacatcatttccctatggcacccggcgatctcccgccaagatatggccaaccaccaaacgcccagcaatcactcctgccaacaatcccaaacactctaaggaccctcacaaaacagggcccgaggacacaactgtcctcattgaaaccaaacgagattattccaccgaattaagt

SEQ ID NO: 4085 - DNA, 639 bp, Homo Sapiens
cagtatccagttgtcaacacaaattatggtaaaatccagggcctaagaacaccattacccagtgagatcttgggtccagtggagcagtacttaggggtcccctatgcctcacccccaactggagagaggcggtttcagccaccagaatccccatcctcctggactggcatccgaaatgctactcagttttctgctgtgtgcccccagcacctggatgaaagattcttattgcatgacatgctgcccatctggtttaccaccagtttggatactttgatgacctatgttcaagatcaaaatgaagactgcctttacttaaacatctatgtgcccatggaagatggaaccaacataaagagaaatgcagacgatataaccagtaatgaccatggtgaagataaagatattcatgaacagaacagtaagaagcctgttatggtctatatccatgggggatcttacatggagggaaccggtaacatgattgatggcagcattttggccagctatgggaacgtcatcgttatcaccattaactaccgtctgggaatactaggtatgcaagaggcacgtttgtgtgggagctcaaaaatgtttaattattttaaatctcctttcactaatttaataaattttttt

SEQ ID NO: 4086 - DNA, 2937 bp, Homo Sapiens
atgaagatggcaagcacccgctgcaagctggccaggtacctggaggacctggaggatgtggacttgaagaaatttaagatgcacttagaggactatcctccccagaagggctgcatccccctcccgaggggtcagacagagaaggcagaccatgtggatctagccacgctaatgatcgacttcaatggggaggagaaggcgtgggccatggccgtgtggatcttcgctgcgatcaacaggagagacctttatgagaaagcaaaaagagatgagccgaagtggggttcagataatgcacgtgtttcgaatcccactgtgatatgccaggaagacagcattgaagaggagtggatgggtttactggagtacctttcgagaatctctatttgtaaaatgaagaaagattaccgtaagaagtacagaaagtacgtgagaagcagattccagtgcattgaagacaggaatgcccgtctgggtgagagtgtgagcctcaacaaacgctacacacgactgcgtctcatcaaggagcaccggagccagcaggagagggagcaggagcttctggccatcggcaagaccaagacgtgtgagagccccgtgagtcccattaagatggagttgctgtttgaccccgatgatgagcattctgagcctgtgcacactgtggtgttccagggggcggcagggattgggaaaacaatcctggccaggaagatgatgttggactgggcgtcggggacactctaccaagacaggtttgactatctgttctatatccactgtcgggaggtgagccttgtgacacagaggagcctgggggacctgatcatgagctgctgccccgacccaaacccacccatccacaagatcgtgagaaaaccctccagaatcctcttcctcatggacggcttcgatgagctgcaaggtgcctttgacgagcacataggaccgctctgcactgactggcagaaggccgagcggggagacattctcctgagcagcctcatcagaaagaagctgcttcccgaggcctctctgctcatcaccacgagacctgtggccctggagaaactgcagcacttgctggaccatcctcggcatgtggagatcctgggtttctccgaggccaaaaggaaagagtacttcttcaagtacttctctgatgaggcccaagccagggcagccttcagtctgattcaggagaacgaggtcctcttcaccatgtgcttcatccccctggtctgctggatcgtgtgcactggactgaaacagcagatggagagtggcaagagccttgcccagacatccaagaccaccaccgcggtgtacgtcttcttcctttccagtttgctgcagccccggggagggagccaggagcacggcctctgcgcccacctctgggggctctgctctttggctgcagatggaatctggaaccagaaaatcctgtttgaggagtccgacctcaggaatcatggactgcagaaggcggatgtgtctgctttcctgaggatgaacctgttccaaaaggaagtggactgcgagaagttctacagcttcatccacatgactttccaggagttctttgccgccatgtactacctgctggaagaggaaaaggaaggaaggacgaacgttccagggagtcgtttgaagcttcccagccgagacgtgacagtccttctggaaaactatggcaaattcgaaaaggggtatttgatttttgttgtacgtttcctctttggcctggtaaaccaggagaggacctcctacttggagaagaaattaagttgcaagatctctcagcaaatcaggctggagctgctgaaatggattgaagtgaaagccaaagctaaaaagctgcagatccagcccagccagctggaattgttctactgtttgtacgagatgcaggaggaggacttcgtgcaaagggccatggactatttccccaagattgagatcaatctctccaccagaatggaccacatggtttcttccttttgcattgagaactgtcatcgggtggagtcactgtccctggggtttctccataacatgcccaaggaggaagaggaggaggaaaaggaaggccgacaccttgatatggtgcagtgtgtcctcccaagctcctctcatgctgcctgttctcatgggttggggcgctgtggcctctcgcatgagtgctgcttcgacatctccttggtcctcagcagcaaccagaagctggtggagctggacctgagtgacaacgccctcggtgacttcggaatcagacttctgtgtgtgggactgaagcacctgttgtgcaatctgaagaagctctggttggtcagctgctgcctcacatcagcatgttgtcaggatcttgcatcagtattgagcaccagccattccctgaccagactctatgtgggggagaatgccttgggagactcaggagtcgcaattttatgtgaaaaagccaagaatccacagtgtaacctgcagaaactggggttggtgaattctggccttacgtcagtctgttgttcagctttgtcctcggtactcagcactaatcagaatctcacgcacctttacctgcgaggcaacactctcggagacaaggggatcaaactactctgtgagggactcttgcaccccgactgcaagcttcaggtgttggaattagacaactgcaacctcacgtcacactgctgctgggatctttccacacttctgacctccagccagagcctgcgaaagctgagcctgggcaacaatgacctgggcgacctgggggtcatgatgttctgtgaagtgctgaaacagcagagctgcctcctgcagaacctggggttgtctgaaatgtatttcaattatgagacaaaaagtgcgttagaaacacttcaagaagaaaagcctgagctgaccgtcgtctttgagccttcttgg

SEQ ID NO: 4087 - DNA, 2799 bp, Homo Sapiens
gagctgctgttgccccaggagacgactgtggagctgagctgtggagtggggccactgcaagtgatcctgggcccagagcaggctgcagtgctaaactgtagcctgggggctgctgccgctggaccccccaccagggtgacctggagcaaggatggggacaccctgctggagcacgaccacttacacctgctgcccaatggttccctgtggctgtcccagccactagcacccaatggcagtgacgagtcagtccctgaggctgtgggggtcattgaaggcaactattcgtgcctagcccacggccccctcggagtgctggccagccagactgctgtcgtcaagcttgccacactcgcagacttctctctgcacccggagtctcagacggtggaggagaacgggacagctcgctttgagtgccacattgaagggctgccagctcccatcattacttgggagaaggaccaggtgacattgcctgaggagcctcggctcatcgtgcttcccaacggcgtccttcagatcctggatgttcaggagagtgatgcaggcccctaccgctgcgtggccaccaactcagctcgccagcacttcagccaggaggccctactcagtgtggcccacagagggtccctggcgtccaccagggggcaggacgtggtcattgtggcagccccagagaacaccacagtggtgtctggccagagtgtggtgatggaatgtgtggcctcagctgaccccaccccttttgtgtcctgggtccgacaagacgggaagcccatctccacagatgtcatcgtcctgggccgcaccaacctactaattgccaacgcgcagccctggcactccggcgtctatgtctgccgcgccaacaagccccgcacgcgcgacttcgccactgcagccgctgagctccgtgtgctggcggctcccgccatcactcaggcgcccgaggcgctgtcgcggacgcgggcgagcacagcgcgcttcgtgtgccgcgcgtcgggggagccgcggccagcgctgcgctggctgcacaacggggcgccgctgcggcccaacgggcgcgtcaaggtccagggcggcggtggcagcctggtcatcacacagatcggcctgcaggacgccggctactaccagtgcgtggctgagaacagcgcgggaatggcgtgcgctgccgcgtcgctggccgtggtggtgcgcgaggggctgcccagcgcccccacgcgggtcactgctacgccactgagcagctccgctgtgttggtggcctgggagcggcccgagatgcacagcgagcagatcatcggcttctctctccactaccagaaggcacggggcatggacaatgtggaataccagtttgcagtgaacaacgacaccacagaactacaggttcgggacctggaacccaacacagattatgagttctacgtggtggcctactcccagctgggagccagccgcacctccaccccagcactggtgcacacactggatgatgtccccagtgcagcaccccagctctccctgtccagccccaacccttcggacatcagggtggcgtggctgcccctgccccccagcctgagcaatgggcaggtggtgaagtacaagatagaatacggtttgggaaaggaagatcagattttctctactgaggtgcgaggaaatgagacacagcttatgctgaactcgcttcagccaaacaaggtgtatcgagtacggatttcggctggtacagcagccggcttcggggccccctcccagtggatgcatcacaggacgcccagtatgcacaaccagagccatgtcccttttgcccctgcagagttgaaggtgcaggcaaagatggagtccctggtcgtgtcatggcagccaccccctcaccccacccagatctctggctacaaactatattggcgggaggtgggggctgaggaggaggccaatggcgatcgcctgccagggggccgtggagaccaggcttgggatgtggggcctgtccggctcaagaagaaagtgaagcagtatgagctgacccagctagtccctggccggctgtacgaggtgaagctcgtggctttcaacaaacatgaggatggctatgcagcagtgtggaagggcaagacggagaaggcgccggcaccagacatgcctatccagaggggaccacccctgcctccagcccacgtccatgcggaatcaaacagctccacatccatctggcttcggtggaaaaagccagatttcaccacagtcaagattgtcaactacactgtgcgcttcagcccctgggggctcaggaatgcctccctggtcacctattacaccagttctggagaagacatcctcattggcggcttgaagccattcaccaaatacgagtttgcagtgcagtctcacggcgtggacatggatgggcctttcggctctgtggtggagcgctccaccctgcctgaccggccctccacacccccatccgacctgcgactgagccccctgacaccgtccacggttcggctgcactggtgcccccccacagagcccaacggggagatcgtggagtatctgatcctgtacagcagcaaccacacgcagcctgagcaccagtggaccttgctcaccacgcagggaaacatcttcagtgctgaggtccatggcctggagagcgacactcggtacttcttcaagatgggggcgcgcacagaggtgggacctgggcctttctcccgcctgcaggatgtgatcacgctccaggagaagctgtcagactcgctggacatgcactcagtcacg

SEQ ID NO: 4088 - DNA, 3630 bp, Homo Sapiens
ttgcagtgtcgagatggctatgaaccctgtgtaaatgaaggaatgtgtgttacctaccacaatggcacaggatactgcaaatgtccagaaggcttcttgggggaatattgtcaacatcgagacccctgtgagaagaaccgctgccagaatggtgggacttgtgtggcccaggccatgctggggaaagccacgtgccgatgtgcctcagggtttacaggagaggactgccagtactcaacatctcatccatgctttgtgtctcgaccctgcctgaatggcggcacatgccatatgctcagccgggatacctatgagtgcacctgtcaagtcgggtttacaggtaaggagtgccaatggacggatgcctgcctgtctcatccctgtgcaaatggaagtacctgtaccactgtggccaaccagttctcctgcaaatgcctcacaggcttcacagggcagaaatgtgagactgatgtcaatgagtgtgacattccaggacactgccagcatggtggcacctgcctcaacctgcctggttcctaccagtgccagtgccctcagggcttcacaggccagtactgtgacagcctgtatgtgccctgtgcaccctcaccttgtgtcaatggaggcacctgtcggcagactggtgacttcacttttgagtgcaactgccttccaggttttgaagggagcacctgtgagaggaatattgatgactgccctaaccacaggtgtcagaatggaggggtttgtgtggatggggtcaacacttacaactgccgctgtcccccacaatggacaggacagttctgcacagaggatgtggatgaatgcctgctgcagcccaatgcctgtcaaaatgggggcacctgtgccaaccgcaatggaggctatggctgtgtatgtgtcaacggctggagtggagatgactgcagtgagaacattgatgattgtgccttcgcctcctgtactccaggctccacctgcatcgaccgtgtggcctccttctcttgcatgtgcccagaggggaaggcaggtctcctgtgtcatctggatgatgcatgcatcagcaatccttgccacaagggggcactgtgtgacaccaaccccctaaatgggcaatatatttgcacctgcccacaaggctacaaaggggctgactgcacagaagatgtggatgaatgtgccatggccaatagcaatccttgtgagcatgcaggaaaatgtgtgaacacggatggcgccttccactgtgagtgtctgaagggttatgcaggacctcgttgtgagatggacatcaatgagtgccattcagacccctgccagaatgatgctacctgtctggataagattggaggcttcacatgtctgtgcatgccaggtttcaaaggtgtgcattgtgaattagaaataaatgaatgtcagagcaacccttgtgtgaacaatgggcagtgtgtggataaagtcaatcgtttccagtgcctgtgtcctcctggtttcactgggccagtttgccagattgatattgatgactgttccagtactccgtgtctgaatggggcaaagtgtatcgatcacccgaatggctatgaatgccagtgtgccacaggtttcactggtgtgttgtgtgaggagaacattgacaactgtgaccccgatccttgccaccatggtcagtgtcaggatggtattgattcctacacctgcatctgcaatcccgggtacatgggcgccatctgcagtgaccagattgatgaatgttacagcagcccttgcctgaacgatggtcgctgcattgacctggtcaatggctaccagtgcaactgccagccaggcacgtcaggggttaattgtgaaattaattttgatgactgtgcaagtaacccttgtatccatggaatctgtatggatggcattaatcgctacagttgtgtctgctcaccaggattcacagggcagagatgtaacattgacattgatgagtgtgcctccaatccctgtcgcaagggtgcaacatgtatcaacggtgtgaatggtttccgctgtatatgccccgagggaccccatcaccccagctgctactcacaggtgaacgaatgcctgagcaatccctgcatccatggaaactgtactggaggtctcagtggatataagtgtctctgtgatgcaggctgggttggcatcaactgtgaagtggacaaaaatgaatgcctttcgaatccgtgccagaatggaggaacttgtgacaatctggtgaatggatacaggtgtacttgcaagaagggctttaaaggctataactgccaggtgaatattgatgaatgtgcctcaaatccatgcctgaaccaaggaacctgctttgatgacataagtggctacacttgccactgtgtgctgccatacacaggcaagaattgtcagacagtattggctccctgttccccaaacccttgtgagaatgctgctgtttgcaaagagtcaccaaattttgagagttatacttgcttgtgtgctcctggctggcaaggtcagcggtgtaccattgacattgacgagtgtatctccaagccctgcatgaaccatggtctctgccataacacccagggcagctacatgtgtgaatgtccaccaggcttcagtggtatggactgtgaggaggacattgatgactgccttgccaatccttgccagaatggaggttcctgtatggatggagtgaatactttctcctgcctctgccttccgggtttcactggggataagtaccagacagacatgaatgagtgtctgagtgaaccctgtaagaatggagggacctgctctgactacgtcaacagttacacttgcaagtgccaggcaggatttgatggagtccattgtgagaacaacatcaatgagtgcactgagagctcctgtttcaatggtggcacatgtgttgatgggattaactccttctcttgcttgtgccctgtgggtttcactggatccttctgcctccatgagatcaatgaatgcagctctcatccatgcctgaatgagggaacgtgtgttgatggcctgggtacctaccgctgcagctgccccctgggctacactgggaaaaactgtcagaccctggtgaatctctgcagtcggtctccatgtaaaaacaaaggtacttgcgttcagaaaaaagcagagtcccagtgcctatgtccatctggatgggctggtgcctattgtgacgtgcccaatgtctcttgtgacatagcagcctccaggagaggtgtgcttgttgaacacttgtgccagcactcaggtgtctgcatcaatgctggcaacacgcattactgtcagtgccccctgggctatactgggagctactgtgaggagcaactcgatgagtgtgcgtccaacccctgccagcacggggcaacatgcagtgacttcattggtggatacagatgcgagtgtgtcccaggctatcagggtgtcaactgtgagtatgaagtggatgagtgccagaatcagccctgccagaatggaggcacctgtattgaccttgtgaaccatttcaagtgctcttgcccaccaggcactcggggtatgaaatcatccttatccattttccatccagggcattgtcttaagtta

SEQ ID NO: 4089 - DNA, 708 bp, Homo Sapiens
atgtgtgttacctaccacaatggcacaggatactgcaaatgtccagaaggcttcttgggggaatattgtcaacatcgagacccctgtgagaagaaccgctgccagaatggtgggacttgtgtggcccaggccatgctggggaaagccacgtgccgatgtgcctcagggtttacaggagaggactgccagtactcgacatctcatccatgctttgtgtctcgaccttgcctgaatggcggcacatgccatatgctcagccgggatacctatgagtgcacctgtcaagtcgggtttacaggtaaggagtgccaatggaccgatgcctgcctgtctcatccctgtgcaaatggaagtacctgtaccactgtggccaaccagttctcctgcaaatgcctcacaggcttcacagggcagaagtgtgagactgatgtcaatgagtgtgacattccaggacactgccagcatggtggcacctgcctcaacctgcctggttcctaccagtgccagtgccttcagggcttcacaggccagtactgtgacagcctgtatgtgccctgtgcaccctcgccttgtgtcaatggaggcacctgtcggcagactggtgacttcacttttgagtgcaactgccttccagaaacagtgagaagaggaacagagctctgggaaagagacagggaagtctggaatggaaaagaacacgatgagaat

SEQ ID NO: 4090 - DNA, 4272 bp, Homo Sapiens
agagggctgctgtgtgggagtttcccagaaccctgtgccaatggaggcacctgcctgagcctgtctctgggacaagggacctgccagtgtgcccctggcttcctgggtgagacgtgccagtttcctgacccctgccagaacgcccagctctgccaaaatggaggcagctgccaagccctgcttcctgctcccctagggctccccagctctccctctccattgacacccagcttcttgtgcacttgcctccctggcttcactggtgagagatgccaggccaagcttgaagacccttgtcctccctccttctgttccaaaaggggccgctgccacatccaggcctcgggccgcccacagtgctcctgcatgcctggatggacaggtgagcagtgccagcttcgggacttctgttcagccaacccatgtgttaatggaggggtgtgtctggccacatacccccagatccagtgccactgcccaccgggcttcgagggccatgcctgtgaacgtgatgtcaacgagtgcttccaggacccaggaccctgccccaaaggcacctcctgccataacaccctgggctccttccagtgcctctgccctgtggggcaggagggtccacgttgtgagctgcgggcaggaccctgccctcctaggggctgttcgaatgggggcacctgccagctgatgccagagaaagactccacctttcacctctgcctctgtcccccaggtttcataggcccagactgtgaggtgaatccagacaactgtgtcagccaccagtgtcagaatgggggcacttgccaggatgggctggacacctacacctgcctctgcccagaaacctggacaggctgggactgctccgaagatgtggatgagtgtgagacccagggtccccctcactgcagaaacgggggcacctgccagaactctgctggtagctttcactgcgtgtgtgtgagtggctggggcggcacaagctgtgaggagaacctggatgactgtattgctgccacctgtgccccgggatccacctgcattgaccgggtgggctctttctcctgcctctgcccacctggacgcacaggactcctgtgccacttggaagacatgtgtctgagccagccgtgccatggggatgcccaatgcagcaccaaccccctcacaggctccacactctgcctgtgtcagcctggctattcggggcccacctgccaccaggacctggacgagtgtctgatggcccagcaaggcccaagtccctgtgaacatggcggttcctgcctcaacactcctggctccttcaactgcctctgtccacctggctacacaggctcccgttgtgaggctgatcacaatgagtgcctctcccagccctgccacccaggaagcacctgtctggacctacttgccaccttccactgcctctgcccgccaggcttagaagggcagctctgtgaggtggagaccaacgagtgtgcctcagctccctgcctgaaccacgcggattgccatgacctgctcaacggcttccagtgcatctgcctgcctggattctccggcacccgatgtgaggaggatatcgatgagtgcagaagctctccctgtgccaatggtgggcagtgccaggaccagcctggagccttccactgcaagtgtctcccaggctttgaagggccacgctgtcaaacagaggtggatgagtgcctgagtgacccatgtcccgttggagccagctgccttgatcttccaggagccttcttttgcctctgcccctctggtttcacaggccagctctgtgaggttcccctgtgtgctcccaacctgtgccagcccaagcagatatgtaaggaccagaaagacaaggccaactgcctctgtcctgatggaagccctggctgtgccccacctgaggacaactgcacctgccaccacgggcactgccagagatcctcatgtgtgtgtgacgtgggttggacggggccagagtgtgaggcagagctagggggctgcatctctgcaccctgtgcccatggggggacctgctacccccagccctctggctacaactgcacctgccctacaggctacacaggacccacctgtagtgaggagatgacagcttgtcactcagggccatgtctcaatggcggctcctgcaaccctagccctggaggctactactgcacctgccctccaagccacacagggccccagtgccaaaccagcactgactactgtgtgtctgccccgtgcttcaatgggggtacctgtgtgaacaggcctggcaccttctcctgcctctgtgccatgggcttccagggcccgcgctgtgagggaaagctccgccccagctgtgcagacagcccctgtaggaatagggcaacctgccaggacagccctcagggtccccgctgcctctgccccactggctacaccggaggcagctgccagactctgatggacttatgtgcccagaagccctgcccacgcaattcccactgcctccagactgggccctccttccactgcttgtgcctccagggatggaccgggcctctctgcaaccttccactgtcctcctgccagaaggctgcactgagccaaggcatagacgtctcttccctttgccacaatggaggcctctgtgtcgacagcggcccctcctatttctgccactgcccccctggattccaaggcagcctgtgccaggatcacgtgaacccatgtgagtccaggccttgccagaacggggccacctgcatggcccagcccagtgggtatctctgccagtgtgccccaggctacgatggacagaactgctcaaaggaactcgatgcttgtcagtcccaaccctgtcacaaccatggaacctgtactcccaaacctggaggcttccactgtgcctgccctccaggctttgtggggctacgctgtgagggagacgtggacgagtgtctggaccagccctgccaccccacaggcactgcagcctgccactctctggccaatgccttctactgccagtgtctgcctggacacacaggccagtggtgtgaggtggagatagacccctgccacagccaaccctgctttcatggagggacctgtgaggccacagcaggatcacccctgggtttcatctgccactgccccaagggttttgaaggccccacctgcagccacagggccccttcctgcggcttccatcactgccaccacggaggcctgtgtctgccctcccctaagccaggcttcccaccacgctgtgcctgcctcagtggctatgggggtcctgactgcctgaccccaccagctcctaaaggctgtggccctccctccccatgcctatacaatggcagctgctcagagaccacgggcttggggggcccaggctttcgatgctcctgccctcacagctctccagggccccggtgtcagaaacccggagccaaggggtgtgagggcagaagtggagatggggcctgcgatgctggctgcagtggcccgggaggaaactgggatggaggggactgctctctgggagtcccagacccctggaagggctgcccctcccactctcggtgctggcttctcttccgggacgggcagtgccacccacagtgtgactctgaagagtgtctgtttgatggctacgactgtgagacccctccagcctgcactccagcctatgaccagtactgccatgatcacttccacaacgggcactgtgagaaaggctgcaacactgcagagtgtggctgggatggaggtgactgcaggcctgaagatggggacccagagtgggggccctccctggccctgctggtggtactgagccccccagccctagaccagcagctgtttgccctggcccgggtgctgtccctgactctgagggtaggactctgggtaaggaaggatcgtgatggcagggacatggtgtacccctatcctggggcccgggctgaagaaaagctaggaggaactcgggaccccacctatcaggagagagcagcccctcaaacgcagcccctgggcaaggagaccgactccctcagtgctgggtttgtggtggtcatgggtgtggatttgtcccgctgtggccctgaccacccggcatcccgctgtccctgggaccctgggcttctactccgcttccttgctgcgatggctgcagtgggagccctggagcccctgctgcctggaccactgctggctgtccaccctcatgcagggaccgcaccccctgccaaccagcttccctgg

SEQ ID NO: 4091 - DNA, 3099 bp, Homo Sapiens
cagttggcgattcctgcctccgttccccggggcttctgggccctgcctgaaaacctgacggtggtggagggggcctcagtggagctgcgttgtggggtcagcacccctggcagtgcggtgcaatgggccaaagatgggctgctcctgggccccgaccccaggatcccaggcttcccgaggtaccgcctggaaggggaccctgctagaggtgaattccacctgcacatcgaggcctgtgacctcagcgatgacgcggagtatgagtgccaggtcggccgctctgagatggggcccgagctcgtgtctcccagagtgatcctctccatcctggttcctcccaagctgctcctgctgaccccagaggcaggcaccatggtcacctgggtagctgggcaggagtacgtggtcaactgtgtgtctggggacgcgaagccagcacctgacatcaccattctcctgagtggacagacaatatctgacatctctgcaaacgtgaacgagggctcccagcagaaactcttcactgtggaggccacagccagggtgacaccccggagctcagataataggcagttgctggtctgtgaggcgtctagcccagcactggaggcccccatcaaggcctcattcaccgtgaatgttctgttccctccaggaccccctgtcatcgagtggccaggcctggatgaggggcacgtgcgggcaggacagagcttggagctgccgtgcgtggcccgagggggtaatcccttagccacactgcagtggctgaagaatggccagccggtgtccacagcgtggggcacagagcacacccaggcggtggcccgcagtgtgctggtgatgaccgtgaggccagaagaccatggagcgcagctcagctgcgaggcccacaacagcgtgtctgcagggacccaggagcacggcatcacactgcaggtcacctttccccctagtgccattattatcttgggatctgcatcccagactgagaacaagaacgtgacactctcctgtgtcagcaagtccagtcgcccgcgggttctgctacgatggtggctgggctggcggcagctgctgcccatggaggagacagtcatggatggactgcatggcggtcacatctccatgtccaacctgacattcctggcgcggcgggaggacaacggtctgaccctcacatgtgaggccttcagtgaagccttcaccaaggagaccttcaagaagtcgctcatcctgaacgtaaaatatcccgcccagaaactgtggattgagggtcccccagagggccagaagctccgggctgggacccgggtgaggctggtgtgtttggctatcgggggcaacccagagccctccctcatgtggtacaaggactcgcgcaccgtgaccgagtcgcggctgccgcaggagtcgcggcgcgtgcatctcggcagcgtggagaaatctgggagcaccttctcccgagagctggtgctggtcacagggccgtcggacaaccaggccaagttcacgtgcaaggctggacagctcagcgcgtccacgcagctggcggtgcagtttcccccaactaacgtgacgatcctggccaacgcatccgcactgcgcccgggagacgccttaaacttgacatgcgtcagcgtcagcagcaatccgccggtcaacttgtcctgggacaaggaaggggagaggctggagggcgtggccgccccaccccggagagccccattcaaaggctccgccgccgccaggagcgtccttctgcaagtgtcatcccgcgatcatggccagcgcgtgacctgccgcgcccacagcgccgagctccgcgaaaccgtgagctccttctatcgcctcaacgtactgtaccgtccagagttcctgggggagcaggtgctggtggtgaccgcggtggagcagggcgaggcgttgctgcccgtgtccgtgtccgctaaccccgcccccgaggccttcaactggaccttccgcggctatcgcctcagtccagcgggcggcccccggcatcgcatcctgtccagcggggctctgcatctgtggaatgtgacccgcgcggacgacggcctctatcagctgcactgccagaactctgagggcaccgcggaagcgcggctgcggctggacgtgcactatgctcccaccatccgtgccctccaggaccccactgaggtgaacgtcgggggttctgtggacatagtctgcactgtcgatgccaatcccatcctcccgggcatgttcaactgggagagactgggagaagatgaggaggaccagagcctggatgacatggagaagatatccaggggaccaacggggcgcctgcggattcaccatgccaaactggcccaggctggcgcttaccagtgcattgtggacaatggggtggcgcctccagcacgacggctgctccgtcttgttgtcagatttgccccccaggtggagcaccccactcccctaactaaggtggctgcagctggagacagcaccagttctgccaccctccactgccgtgcccgaggtgtccccaacatcgttttcacttggacaaaaaacggggtccctctggatctccaagatcccaggtacacggagcacacataccaccagggtggtgtccacagcagcctcctgaccattgccaacgtgtctgccgcccaggattacgccctcttcacatgtacagccaccaacgcccttggctcggaccaaaccaacattcaacttgtcagcatcagccgccctgaccctccatcaggattaaaggttgtgagtctgaccccacactccgtggggctggagtggaagcctggctttgatgggggcctgccacagaggttctgcatcaggtatgaggccctggggactccagggttccactatgtggatgtcgtaccaccccaggccaccaccttcacgctgactggtctacagccttctacaagatacagggtctggctgctggccagtaatgccttgggggacagtggactggctgacaaagggacccagcttcccatcactaccccaggtctccaccagccttctggagaacctgaagaccagctgcccacagagccaccttca

SEQ ID NO: 4092 - DNA, 1638 bp, Homo Sapiens
gaatttgacgggagatggcccaggcagatcgtatccagcataggactatgccgttacggaggcagaatagactgctgctggggctgggctaggcaatcttggggtcaatgccagccggtttgccaaccgagatgcaaacacggcgaatgcataggcccgaataaatgtaagtgccatcccggttatgcggggaaaacctgcaatcaagatcttaatgagtgcggcctaaaacctcgtccttgcaaacatcgttgcatgaatacttacggctcttacaaatgttattgcttaaatggctatatgcttatgccagatggtagttgttcaagtgcactaacgtgcagcatggctaactgtcaatatggctgcgatgtcgtaaaaggccaaatcagatgtcagtgcccctctcccggtcttcagttagctcccgatggaaggacttgtgtcgatgtagatgagtgtgctacaggtcgtgcctcctgcccacgttttaggcaatgcgttaatacgtttggttcatatatttgtaagtgccataagggcttcgatttgatgtacattggaggcaaataccagtgtcatgacattgatgaatgctccctagggcaatatcagtgctcttcctttgcgaggtgttacaacatcagaggtagttataagtgcaagtgtaaggaggggtaccaaggcgacgggcttacttgcgtctacatacccaaagtaatgatcgaacccagcggccccatacatgtaccaaaaggtaatggcacgatattaaagggggacactgggaataataactggatacccgatgtgggatcaacatggtggcccccgaaaacaccatatataccaccgataataacgaacagacctacttctaagccgacgacccgtcccactccaaaaccgactcccatcccaacccctccccctccccctccacttcccacagagctacgtacacctttacctccgacgacacccgagcgtcctacgactgggttgacgacaatagcaccggctgcgagtacaccgcccggcgggatcactgtcgacaatcgtgtgcagacggaccctcagaaacccagaggagatgtatttataccacgtcaaccgtccaacgacctattcgaaatatttgaaatagagaggggcgtcagtgcagatgatgaagccaaagacgaccccggcgttttggtccattcatgcaatttcgatcatggcttatgtgggtggattagagagaaagacaatgaccttcactgggaacccataagggacccggctggggggcagtacttgactgtgagtgccgcgaaagctcctggggggaaggcagcccgtctggtcctgccattaggaaggctgatgcattccggtgacctatgtctatcctttcgtcataaggtgacagggcttcacagtggaactctacaagtctttgtgcgtaagcacggcgcacacggcgctgcgctatggggcaggaacgggggacatggatggaggcaaactcaaatcaccctaaggggtgccgatattaaatctgtggtattcaaaggggagaaaaggcgtgggcacacgggggaaattggccttgatgacgtgtccctgaagaaaggtcactgcagcgaagaaagg

SEQ ID NO: 4093 - DNA, 585 bp, Homo Sapiens
cagaacgagccaaggattgtcaccagtgaagaggtcattattcgagacagccctgttctccctgtcaccctgcagtgtaacctcacctccagctctcacacccttacatacagctactggacaaagaatggggtggaactgagtgccactcgtaagaatgccagcaacatggagtacaggatcaataagccgagagctgaggattcaggcgaataccactgcgtatatcactttgtcagcgctcctaaagcaaacgccaccattgaagtgaaagccgctcctgacatcactggccataaacggagtgagaacaagaatgaagggcaggatgccactatgtattgcaagtcagttggctacccccacccagactggatatggcgcaagaaggagaacgggatgcccatggacattgtcaatacctctggccgcttcttcatcatcaacaaggaaaattacactgagttgaacattgtgaacctgcagatcacggaagaccctggcgagtatgaatgtaatgccaccaacgccattggctccgcctctgttgtcactgtcctcagggtgcggagccacctggcccca

SEQ ID NO: 4094 - DNA, 3093 bp, Homo Sapiens
cagatgattagtgcactggaagtacctcttgatccaaaacttcttgaagacttggtacagcctccaaccatcacccaacagtctccaaaagattacattattgaccctcgggagaatattgtaatccagtgtgaagccaaagggaaaccgcccccaagcttttcctggacccgtaatgggactcattttgacatcgataaagaccctctggtcaccatgaagcctggcacaggaacgctcataattaacatcatgagcgaagggaaagctgagacctatgaaggagtctatcagtgtacagcaaggaacgaacgcggagctgcagtttctaataacattgttgtccgcccatccagatcaccattgtggaccaaagaaaaacttgaaccaatcacacttcaaagtggtcagtctttagtacttccctgcagacccccaattggattaccaccacctataatattttggatggataattcctttcaaagacttccacaaagtgagagagtttctcaaggtttgaatggggacctttatttttccaatgtcctcccagaggacacccgcgaagactatatctgttatgctagatttaatcatactcaaaccatacagcagaagcaacctatttctgtgaaggtgatttcagctaaatcaagtagagagaggccaccaacatttttaactccagaaggcaatgcaagtaacaaagaggaattaagaggaaatgtgctttcactggagtgcattgcagaaggactgcctaccccaattatttactgggcaaaggaagatggaatgctacccaaaaacaggacagtttataagaactttgagaaaaccttgcagatcattcatgtttcagaagcagactctggaaattaccaatgtatagcaaaaaatgcattaggagccatccaccataccatttctgttagagttaaagcggctccatactggatcacagcccctcaaaatcttgtgctgtccccaggagaggatgggaccttgatctgcagagctaatggcaaccccaaacccagaattagctggttaacaaatggagtcccaatagaaattgcccctgatgaccccagcagaaaaatagatggcgataccattattttttcaaatgttcaagaaagatcaagtgcagtatatcagtgcaatgcctctaatgaatatggatatttactggcaaacgcatttgtaaatgtgctggctgagccaccacgaatcctcacacctgcaaacacactctaccaggtcattgcaaacaggcctgctttactagactgtgccttctttgggtctcctctcccaaccatcgagtggtttaaaggagctaaaggaagtgctcttcatgaagatatttatgttttacatgaaaatggaactttggaaattcctgtggcccaaaaggacagtacaggaacttatacgtgtgttgcaaggaataaattagggatggcaaagaatgaagttcacttagaaatcaaagatgctacatggatcgttaaacagcccgaatatgcagttgtgcaaagagggagcatggtgtcctttgaatgcaaagtgaaacatgatcacaccttatccctcactgtcctgtggctgaaggacaacagggaactgcccagtgatgaaaggttcactgttgacaaggatcatctagtggtagctgatgtcagtgacgatgacagcgggacctacacgtgtgtggccaacaccactctggacagcgtctccgccagcgctgtgcttagcgttgttgctcctactccaactccagctcccgtttacgatgtcccaaatcctccctttgacttagaactgacagatcaacttgacaaaagtgttcagctgtcatggaccccaggcgatgacaacaatagccccattacaaaattcatcatcgaatatgaagatgcaatgcacaagccagggctgtggcaccaccaaactgaagtttctggaacacagaccacagcccagctgaagctgtctccttacgtgaactactccttccgcgtgatggcagtgaacagcattgggaagagcttgcccagcgaggcctctgagcagtatttgacgaaagcctcagaaccagataaaaaccccacagctgtggaaggactgggatcagagcctgataatttggtgattacgtggaagcccttgaatggtttcgaatctaatgggccaggccttcagtacaaagttagctggcgccagaaagatggtgatgatgaatggacatctgtggttgtggcaaatgtatccaaatatattgtctcaggcacgccaacctttgttccatacctgatcaaagttcaggccctgaatgacatggggtttgcccccgagccagctgtagtcatgggacattctggagaagacctcccaatggtggctcctgggaacgtgcgtgtgaatgtggtgaacagtaccttagccgaggtgcactgggacccagtacctctgaaaagcatccgaggacacctacaaggctatcggatttactattggaagacccagagttcatctaaaagaaacagacgtcacattgagaaaaagatcctcaccttccaaggcagcaagactcatggcatgttgccggggctagagccctttagccactacacactgaatgtccgagtggtcaatgggaaaggggagggcccagccagccctgacagagtctttaatactccagaaggagtccccagtgctccctcgtctttgaagattgtgaatccaacactggactctctcactttggaatgggatccaccgagccacccgaatggcattttgacagagtacaccttaaagtatcagccaattaacagcacacatgaattaggccctctggtagatttgaaaattcctgccaacaagacacggtggactttaaaaaatttaaatttcagcactcgatataagttttatttctatgcacaaacatcagcaggatcaggaagtcaaattacagaggaagcagtaacaactgtggatgaagctggtattcttccacctgatgtaggtgcaggcaaagcgatggcaagccggcaggtggatattgcaactcag

SEQ ID NO: 4095 - DNA, 669 bp, Homo Sapiens
tccggcaagaagccggagtccgcggcgggcagccagagcccagccttgcctccccaattgaaagagatgaaaagccaggaatcggctgcaggttccaaactagtccttcggtgtgaaaccagttctgaatactcctctctcagattcaagtggttcaagaatgggaatgaattgaatcgaaaaaacaaaccacaaaatatcaagatacaaaaaaagccagggaagtcagaacttcgcattaacaaagcatcactggctgattctggagagtatatgtgcaaagtgatcagcaaattaggaaatgacagtgcctctgccaatatcaccatcgtggaatcaaacgagatcatcactggtatgccagcctcaactgaaggagcatatgtgtcttcagagtctcccattagaatatcagtatccacagaaggagcaaatacttcttcatctacatctacatccaccactgggacaagccatcttgtaaaatgtgcggagaaggagaaaactttctgtgtgaatggaggggagtgcttcatggtgaaagacctttcaaacccctcgagatacttgtgcaagtgccaacctggattcactggagcaagatgtactgagaatgtgcccatgaaagtccaaaaccaagaaaaggcggaggagctgtaccagaagaga

SEQ ID NO: 4096 - DNA, 588 bp, Homo Sapiens
gacaagatctttgaatatgactctcctactcaccttgaccctggggggttaggccaggaccctattatttctctggacgcaactgctgcctcagctctgtgggtgtcgtctgaggcatacacttcacctgtctctagggctcaatctgaaagtgaggttcaagttacagtgcaaggtgacaaggctgttgtctcctttgaaccatcagcggcaccgacaccgaagaatcgtatttttgccttttctttcttgccgtccactgcgccatccttcccttcacccacccggaaccctgaggtgagaacgcccaagtcagcaactcagccacaaacaacagaaactaatctccaaactgctcctaaactttctacatctacatccaccactgggacaagccatcttgtaaaatgtgcggagaaggagaaaactttctgtgtgaatggaggggagtgcttcatggtgaaagacctttcaaacccctcgagatacttgtgcaagtgcccaaatgagtttactggtgatcgctgccaaaactacgtaatggccagcttctacagtacgtccactccctttctgtctctgcctgaa

SEQ ID NO: 4097 - DNA, 882 bp, Homo Sapiens
tgttacagcccgtcattaaaaagcgttcaagatcaggcctataaagcacctgtggtggtggaagggaaagttcagggactggtcccggcaggtggcagcagtagcaactccaccagggaaccgcccgcctctggcagggtcgctcttgtcaaagtgttggataagtggcctctgcgtagcggcggcttgcagcgtgagcaggtgataagtgtgggctcatgtgtgcccctagaaaggaatcaaaggtacatattttttttagagccgacagaacagccccttgtgtttaagaccgctttcgcgcctctggatacaaacggcaagaatttgaaaaaagaagtcgggaagatcctatgcaccgattgcgcgacgagacctaaacttaagaagatgaagagccaaaccggccaggtaggtgaaaagcagtccctgaaatgtgaagctgccgcgggaaatccgcagccgagctaccgttggtttaaggacggtaaggaattaaatcgtagtagggatattaggataaaatacggaaatggcagaaaaaacagccgtttgcagttcaataaggtgaaggtggaggacgcgggcgagtacgtgtgcgaggcagaaaatatcttaggcaaggatactgtcaggggtaggttgtacgtgaatagtgtttccactactctgtcatcatggtccggccatgctcgtaaatgcaacgagacagccaagagctattgtgtgaatggaggagtatgttactatatcgaagggataaaccaattgtcatgtaaatgccctaatggttttttcggacagcgttgtttagaaaaactgccgttgagactttacatgccggaccccaaacagaaggcggaggaattataccaaaaaagg

SEQ ID NO: 4098 - DNA, 1077 bp, Homo Sapiens
atgagtgaaggggcggccgctgcctcgccacctggtgccgcttcggcagccgccgcctcggccgaggagggcaccgcggcggctgcggcggcggcagcggcgggcgggggcccggacggcggcggcgaaggggcggccgagcccccccgggagttacgctgtagcgactgcatcgtgtggaaccggcagcagacgtggctgtgcgtggtacctctgttcatcggcttcatcggcctggggctcagcctcatgcttctcaaatggatcgtggtgggctccgtcaaggagtacgtgcccaccgacctagtggactccaaggggatgggccaggaccccttcttcctctccaagcccagctctttccccaaggccatggagaccaccaccactaccacttccaccacgtcccccgccaccccctccgccgggggtgccgcctcctccaggacgcccaaccggattagcactcgcctgaccaccatcacgcgggcgcccactcgcttccccgggcaccgggtgcccatccgggccagcccgcgctccaccacagcacggaacactgcggcccctgcgacggtcccgtccaccacggccccgttcttcagtagcagcacgctgggctcccgacccccggtgccaggaactccaagtacccaggcaatgccctcctggcctactgcggcatacgctacctcctcctaccttcacgattctactccctcctggaccctgtctccctttcaggatgctgcctcctcttcttcctcttcttcctcctccgctaccaccaccacaccagaaactagcaccagccccaaatttcatacgacgacatattccacagagcgatccgagcacttcaaaccctgccgagacaaggaccttgcatactgtctcaatgatggcgagtgctttgtgatcgaaaccctgaccggatcccataaacactgtcggtgcaaagaaggctaccaaggagtccgttgtgatcaatttctgccgaaaactgattccatcttatcggatccaaaccacttggggattgaattcatggagagtgaagaagtttatcaaaggcag

SEQ ID NO: 4099 - DNA, 183 bp, Homo Sapiens
atgccaacagatcacgaagagccctgtggtcccagtcacaagtcgttttgcctgaatggggggctttgttatgtgatacctactattcccagcccattttgtaggtgcgttgaaaactatacaggagctcgttgtgaagaggtttttctcccaggctccagcatccaaactaaaagtaacctg

SEQ ID NO: 4100 - DNA, 2505 bp, Homo Sapiens
tttcgcaacgataaatgtggcgatactataaaaattgaaagccccgggtaccttacatctcctggttatcctcattcttatcacccaagtgaaaaatgcgaatggctgattcaggctccggacccataccagagaattatgatcaacttcaaccctcacttcgatttggaggacagagactgcaagtatgactacgtggaagtcttcgatggagaaaatgaaaatggacattttaggggaaagttctgtggaaagatagcccctcctcctgttgtgtcttcagggccatttctttttatcaaatttgtctctgactacgaaacacatggtgcaggattttccatacgttatgaaattttcaagagaggtcctgaatgttcccagaactacacaacacctagtggagtgataaagtcccccggattccctgaaaaatatcccaacagccttgaatgcacttatattgtctttgcaccaaagatgtcagagattatcctggaatttgaaagctttgacctggagcctgactcaaatcctccaggggggatgttctgtcgctacgaccggctagaaatctgggatggattccctggtgttggccctcacattgggcgttactgtggacagaaaacaccaggtcgaatccgatcctcatcgggcattctctccatggttttttacaccgacagcgcgatagcaaaagaaggtttctcagcaaactacagtgttttgcagagcagtgtctcagaagatttcaaatgtatggaagctctgggcatggaatcaggagaaattcattctgaccagatcacagcttcttcccagtatagcaccaactggtctgcagagcgctcccgcctgaactaccctgagaatgggtggactcccggagaggattcctaccgagagtggatacaggtagacttgggccttctgcgctttgtcacggctgtcgggacacagggcgccatttcaaaagaaaccaagaagaaatattatgtcaagacttacaagatcgacgttagctccaacggggaagactggatcaccataaaagaaggaaacaaacctgttctctttcagggaaacaccaaccccacagatgttgtggttgcagtattccccaaaccactgataactcgatttgtccgaatcaagcctgcaacttgggaaactggcatatctatgagatttgaagtatacggttgcaagataacagattatccttgctctggaatgttgggtatggtgtctggacttatttctgactcccagatcacatcatccaaccaaggggacagaaactggatgcctgaaaacatccgcctggtaaccagtcgctctggctgggcacttccacccgcacctcattcctacatcaatgagtggctccaaatagacctgggggaggagaagatcgtgaggggcatcatcattcagggtgggaagcaccgagagaacaaggtgttcatgaggaagttcaagatcgggtacagcaacaacggctcggactggaagatgatcatggatgacagcaaacgcaaggcgaagtcttttgagggcaacaacaactatgatacacctgagctgcggacttttccagctctctccacgcgattcatcaggatctaccccgagagagccactcatggcggactggggctcagaatggagctgctgggctgtgaagtggaagcccctacagctggaccgaccactcccaacgggaacttggtggatgaatgtgatgacgaccaggccaactgccacagtggaacaggtgatgacttccagctcacaggcggcaccactgtgccggccacagaaaagcccacggtcatagacagcaccatacaatcagagtttccaacatatggttttaactgtgaatttggctggggctctcacaagaccttctgccactgggaacatgacaatcacgtgcagctcaagtggagtgtgttgaccagcaagacgggacccattcaggatcacacaggagatggcaacttcatctattcccaagctgacgaaaatcagaagggcaaagtggctcgcctggtgagccctgtggtttattcccagaactctgcccactgcatgaccttctggtatcacatgtctgggtcccacgtcggcacactcagggtcaaactgcgctaccagaagccagaggagtacgatcagctggtctggatggccattggacaccaaggtgaccactggaaggaagggcgtgtcttgctccacaagtctctgaaactttatcaggtgattttcgagggcgaaatcggaaaaggaaaccttggtgggattgctgtggatgacattagtattaataaccacatttcacaagaagattgtgcaaaaccagcagacctggataaaaagaacccagaaattaaaattgatgaaacagggagcacgccaggatacgaaggtgaaggagaaggtgacaagaacatctccaggaagccaggcaatgtgttgaagaccttagacccc

SEQ ID NO: 4101 - DNA, 2517 bp, Homo Sapiens
agaggccaaccagacccaccgtgcggaggtcgtttgaattccaaagatgctggctatatcacctctcccggttacccccaggactacccctcccaccagaactgcgagtggattgtttacgcccccgaacccaaccagaagattgtcctcaacttcaaccctcactttgaaatcgagaagcacgactgcaagtatgactttatcgagattcgggatggggacagtgaatccgcagacctcctgggcaaacactgtgggaacatcgccccgcccaccatcatctcctcgggctccatgctctacatcaagttcacctccgactacgcccggcagggggcaggcttctctctgcgctacgagatcttcaagacaggctctgaagattgctcaaaaaacttcacaagccccaacgggaccatcgaatctcctgggtttcctgagaagtatccacacaacttggactgcacctttaccatcctggccaaacccaagatggagatcatcctgcagttcctgatctttgacctggagcatgaccctttgcaggtgggagagggggactgcaagtacgattggctggacatctgggatggcattccacatgttggccccctgattggcaagtactgtgggaccaaaacaccctctgaacttcgttcatcgacggggatcctctccctgacctttcacacggacatggcggtggccaaggatggcttctctgcgcgttactacctggtccaccaagagccactagagaactttcagtgcaatgttcctctgggcatggagtctggccggattgctaatgaacagatcagtgcctcatctacctactctgatgggaggtggacccctcaacaaagccggctccatggtgatgacaatggctggacccccaacttggattccaacaaggagtatctccaggtggacctgcgctttttaaccatgctcacggccatcgcaacacagggagcgatttccagggaaacacagaatggctactatgtcaaatcctacaagctggaagtcagcactaatggagaggactggatggtgtaccggcatggcaaaaaccacaaggtatttcaagccaacaacgatgcaactgaggtggttctgaacaagctccacgctccactgctgacaaggtttgttagaatccgccctcagacctggcactcaggtatcgccctccggctggagctcttcggctgccgggtcacagatgctccctgctccaacatgctggggatgctctcaggcctcattgcagactcccagatctccgcctcttccacccaggaatacctctggagccccagtgcagcccgcctggtcagcagccgctcgggctggttccctcgaatccctcaggcccagcccggtgaggagtggcttcaggtagatctgggaacacccaagacagtgaaaggtgtcatcatccagggagcccgcggaggagacagtatcactgctgtggaagccagagcatttgtgcgcaagttcaaagtctcctacagcctaaacggcaaggactgggaatacattcaggaccccaggacccagcagccaaagctgttcgaagggaacatgcactatgacacccctgacatccgaaggtttgaccccattccggcacagtatgtgcgggtatacccggagaggtggtcgccggcggggattgggatgcggctggaggtgctgggctgtgactggacagactccaagcccacggtagagacgctgggacccactgtgaagagcgaagagacaaccaccccctaccccaccgaagaggaggccacagagtgtggggagaactgcagctttgaggatgacaaagatttgcagctcccttcgggattcaattgcaacttcgatttcctcgaggagccctgtggttggatgtatgaccatgccaagtggctccggaccacctgggccagcagctccagcccaaacgaccggacgtttccagatgacaggaatttcttgcggctgcagagtgacagccagagagagggccagtatgcccggctcatcagcccccctgtccacctgccccgaagcccggtgtgcatggagttccagtaccaggccacgggcggccgcggggtggcgctgcaggtggtgcgggaagccagccaggagagcaagttgctgtgggtcatccgtgaggaccagggcggcgagtggaagcacgggcggatcatcctgcccagctacgacatggagtaccagattgtgttcgagggagtgatagggaaaggacgttccggagagattgccattgatgacattcggataagcactgatgtcccactggagaactgcatggaacccatctcggcttttgcagtggacatcccagaaatacatgagagagaaggatatgaagatgaaattgatgatgaatacgaggtggactggagcaattcttcttctgcaacctcagggtctggcgccccctcgaccgacaaagaaaagagctggctgtacaccctggatccc

SEQ ID NO: 4102 - DNA, 1896 bp, Homo Sapiens
tggaggaacagaagcggaacagccacagcagcctcccaaggagtctgcaagttggtgggtggagccgctgactgccgagggcagagcctcgcttcggtgcccagcagcctcccgccccacgcccggatgctcaccctggatgccaaccctctcaagaccctgtggaatcactccctccagccttaccctctcctggagagcctcagcctgcacagctgccacctggagcgcatcagccgcggcgccttccaggagcaaggtcacctgcgcagcctggtactgggggacaactgcctctcagagaactacgaagagacggcagccgccctccacgccctgccgggcctgcggaggctggacttgtcaggaaacgccctgacggaggacatggcagcgctcatgctccagaacctctcctcgctgcggtccgtgtccctggcggggaacaccatcatgcggctggacgactccgtcttcgagggcctggagcgtctccgggagctggatctgcagaggaactacatcttcgagatcgagggcggcgctttcgacggcctggctgagctgaggcacctcaacctggccttcaacaacctcccctgcatcgtggacttcgggctcacgcggctgcgggtcctcaacgtcagctacaacgtcctggagtggttcctcgcgaccgggggagaggctgccttcgagctggagacgctggacctgtctcacaaccagctgctgttcttcccgctgctgccccagtacagcaagttgcggaccctcctgctgcgcgacaacaacatgggcttctaccgggacctgtacaacacctcgtcgccgagggagatggtggcccagttcctcctcgtggacggcaacgtgaccaacatcaccaccgtcagcctctgggaagaattctcctccagcgacctcgcagatctccgcttcctggacatgagccagaaccagttccagtacctgccagacggcttcctgaggaaaatgccttccctctcccacctgaacctccaccagaattgcctgatgacgcttcacattcgggagcacgagccccccggagcgctcaccgagctggacctgagccacaaccagctgtcggagctgcacctggctccggggctggccagctgcctgggcagcctgcgcttgttcaacctgagctccaaccagctcctgggcgtcccccctggcctcttcgccaatgctaggaacatcactacacttgacatgagccacaatcagatctcactttgtcccctgccagctgcctcggaccgggtgggcccccctagctgtgtggatttcaggaatatggcatctttaaggagcctgtctctggagggctgtggcctgggggcattgccagactgcccattccaagggacctccctgacctacttagacctctcaagcaactggggggttctgaatgggagcctcgccccactccaggatgttgcccccatgttacaggtcctgtctctcaggaacatgggcctccactccagctttatggcgttggacttctctgggtttgggaatctcagggacttagatctgtcggggaattgcttgaccaccttcccaaggtttgggggcagcctggccctggagaccctggatctccgtagaaactcgctcacagcccttccccagaaggctgtgtctgagcagctctcgagaggtctgcggaccatctacctcagtcagaatccatatgactgctgtggggtggatggctggggggccctgcagcatgggcagacggtggccgactgggccatggtcacctgcaacctctcctccaagatcatccgcgtgacggagctgcccggaggtgtgcctcgggactgcaagtgggagcggctggacctgggcctg

SEQ ID NO: 4103 - DNA, 744 bp, Homo Sapiens
ctggagtttccgggcgccgagggccaatggacgcgcttccccaagtggaacgcctgctgcgagagcgagatgagcttccagctcaagactcgcagcgcccgcggcctcgtgctctacttcgacgacgagggcttctgcgacttcctggagctgattctgacgcgcggcggccgcctgcagctcagcttctccgtcttctgcgctgagcctgcgacgctcctggccgacacgccggttaacgacggcgcctggcacagcgtgcgcatccgccgccagttccgcaacaccacgctcttcatcgaccaggtggaggccaagtgggtggaggtcaagtccaagcgcagggacatgacggtgttcagcggccttttcgtcggggggctgcccccggaactgcgcgccgcggcgctcaagctcaccctggcctcggtgagggagcgggagcccttcaaggggtggattcgtgacgtgggggtcaactcctcgcaggtcctgcccgtggacagcggcgaggtgaagctggacgatgagccgcccaacagcggcgggggaagcccgtgcgaggcgggcgaggagggcgagggcggggtgtgcctcaacggaggtgtgtgctccgtggtggacgaccaggccgtgtgcgactgctcgcgaaccggcttccgcggcaaggactgcagccaagaagacaacaatgtggaaggtctggcgcacctgatgatgggcgaccaaggtaaaagtaaagat

SEQ ID NO: 4104 - DNA, 1047 bp, Homo Sapiens
tcttctaatgtagcttcctcctcctccacctcttcctcgccggggtctcactctcagcacgagcaccatttccatggcagcaagcatcactcagtgcctatttctatctatcgttcccctgtttcccttcgaggaggacacgctggcgctacgtacatctttgggaaaagtggtgggcttatcctctacacctggccagccaatgacaggcccagcacgcggtctgaccgccttgccgtgggcttcagcaccactgtgaaggatggcatcttggtccgcatcgacagtgctccaggacttggtgacttcctccagcttcacatagaacaggggaaaattggagttgtcttcaacattggcacagttgacatctccatcaaagaggagagaacccctgtaaatgacggcaaataccatgtggtacgcttcaccaggaacggcggcaacgccaccctgcaggtggacaactggccagtgaatgaacattatcctacaggcaacactgataatgaacgcttccaaatggtaaaacagaaaatccccttcaaatataatcggcctgtagaggagtggctgcaggaaaaaggccggcagttaaccatcttcaacactcaggcgcaaatagccattggtggaaaggacaaaggacgcctcttccaaggccaactctctgggctctattatgatggtttgaaagtactgaacatggcggctgagaacaaccccaatattaaaatcaatggaagtgttcggctggttggagaagtcccatcaattttgggaacaacacagacgacctccatgccaccagaaatgtctactactgtcatggaaaccactactacaatggcgactaccacaacccgtaagaatcgctctacagccagcattcagccaacatcagatgatcttgtttcatctgctgaatgttcaagtgatgatgaagactttgttgaatgtgagccgagtacagcaaaccccacggagccgggaatcagacgggttccgggggcctcagaggtgatccgggagtcgagcagcacaaca

SEQ ID NO: 4105 - DNA, 1569 bp, Homo Sapiens
tgggagcttacgattttgcacaccaacgacgtgcacagccggctggagcagaccagcgaggactccagcaagtgcgtcaacgccagccgctgcatgggtggcgtggctcggctcttcaccaaggttcagcagatccgccgcgccgaacccaacgtgctgctgctggacgccggcgaccagtaccagggcactatctggttcaccgtgtacaagggcgccgaggtggcgcacttcatgaacgccctgcgctacgatgccatggcactgggaaatcatgaatttgataatggtgtggaaggactgatcgagccactcctcaaagaggccaaatttccaattctgagtgcaaacattaaagcaaaggggccactagcatctcaaatatcaggactttatttgccatataaagttcttcctgttggtgatgaagttgtgggaatcgttggatacacttccaaagaaaccccttttctctcaaatccagggacaaatttagtgtttgaagatgaaatcactgcattacaacctgaagtagataagttaaaaactctaaatgtgaacaaaattattgcactgggacattcgggttttgaaatggataaactcatcgctcagaaagtgaggggtgtggacgtcgtggtgggaggacactccaacacatttctttacacaggcaatccaccttccaaagaggtgcctgctgggaagtacccattcatagtcacttctgatgatgggcggaaggttcctgtagtccaggcctatgcttttggcaaatacctaggctatctgaagatcgagtttgatgaaagaggaaacgtcatctcttcccatggaaatcccattcttctaaacagcagcattcctgaagatccaagcataaaagcagacattaacaaatggaggataaaattggataattattctacccaggaattagggaaaacaattgtctatctggatggctcctctcaatcatgccgctttagagaatgcaacatgggcaacctgatttgtgatgcaatgattaacaacaacctgagacacgcggatgaaacgttctggaaccacgtatccatgtgcattttaaatggaggtggtatccggtcgcccattgatgaacgcaacaatggcacaattacctgggagaacctggctgctgtattgccctttggaggcacatttgacctagtccagttaaaaggttccaccctgaagaaggcctttgagcatagcgtgcaccgctacggccagtccactggagagttcctgcaggtgggcggaatccatgtggtgtatgatctttcccgaaaacctggagacagagtagtcaaattagatgttctttgcaccaagtgtcgagtgcccagttatgaccctctcaaaatggacgaggtatataaggtgatcctcccaaacttcctggccaatggtggagatgggttccagatgataaaagatgaattattaagacatgactctggtgaccaagatatcaacgtggtttctacatatatctccaaaatgaaagtaatttatccagcagttgaaggtcggatcaagttttcc

SEQ ID NO: 4106 - DNA, 357 bp, Homo Sapiens
tacgcggagcataagagtcaccgaggggagtactcggtatgtgacagtgagagtctgtgggtgaccgacaagtcatcggccatcgacattcggggacaccaggtcacggtgctgggggagatcaaaacgggcaactctcccgtcaaacaatatttttatgaaacgcgatgtaaggaagccaggccggtcaaaaacggttgcaggggtattgatgataaacactggaactctcagtgcaaaacatcccaaacctacgtccgagcactgacttcagagaacaataaactcgtgggctggcggtggatacggatagacacgtcctgtgtgtgtgccttgtcgagaaaaatcggaagaaca

SEQ ID NO: 4107 - DNA, 390 bp, Homo Sapiens
ggggtgagcgaaactgcaccagcgagtcgtcggggtgagctggctgtgtgcgatgcagtcagtggctgggtgacagaccgccggaccgctgtggacttgcgtgggcgcgaggtggaggtgttgggcgaggtgcctgcagctggcggcagtcccctccgccagtacttctttgaaacccgctgcaaggctgataacgctgaggaaggtggcccgggggcaggtggagggggctgccggggagtggacaggaggcactgggtatctgagtgcaaggccaagcagtcctatgtgcgggcattgaccgctgatgcccagggccgtgtgggctggcgatggattcgaattgacactgcctgcgtctgcacactcctcagccggactggccgggcc

SEQ ID NO: 4108 - DNA, 849 bp, Homo Sapiens
ggagatgccaccttccccaaagctatggacaacgtgacggtccggcagggggagagcgccaccctcaggtgcactattgacaaccgggtcacccgggtggcctggctaaaccgcagcaccatcctctatgctgggaatgacaagtggtgcctggatcctcgcgtggtccttctgagcaacacccaaacgcagtacagcatcgagatccagaacgtggatgtgtatgacgagggcccttacacctgctcggtgcagacagacaaccacccaaagacctctagggtccacctcattgtgcaagtatctcccaaaattgtagagatttcttcagatatctccattaatgaagggaacaatattagcctcacctgcatagcaactggtagaccagagcctacggttacttggagacacatctctcccaaagcggttggctttgtgagtgaagacgaatacttggaaattcagggcatcacccgggagcagtcaggggactacgagtgcagtgcctccaatgacgtggccgcgcccgtggtacggagagtaaaggtcaccgtgaactatccaccatacatttcagaagccaagggtacaggtgtccccgtgggacaaaaggggacactgcagtgtgaagcctcagcagtcccctcagcagaattccagtggtacaaggatgacaaaagactgattgaaggaaagaaaggggtgaaagtggaaaacagacctttcctctcaaaactcatcttcttcaatgtctctgaacatgactatgggaactacacttgcgtggcctccaacaagctgggccacaccaatgccagcatcatgctatttggtgagactgtgctc

SEQ ID NO: 4109 - DNA, 1740 bp, Homo Sapiens
ggaccaggtctttcaatgttcgctgggcaagcggctcagcccgatccatgtagtgatgaaaacggacatccaagaaggtgcatacccgactttgtcaacgccgcttttggcaaagacgtgagagtctcatccacgtgtggaaggccacccgccagatactgcgtcgttagcgaaaggggcgaggaaaggctgcgttcatgtcacctatgcaacgcatctgatccgaaaaaagcccatccaccagcctttcttacagatctgaataatccgcataatctaacgtgttggcagtcagagaactatctacagtttccacataatgtcacgttgactttaagcctaggcaaaaagttcgaggtaacatacgtgtccctacaattctgtagccccaggcccgagtccatggccatctacaagtctatggactatgggcgtacttgggttcctttccaattttactctactcaatgcagaaaaatgtataataggcctcacagggcacctataacgaagcagaatgagcaggaggccgtgtgcacagactcccacacggatatgcgtccgttaagtggtggacttattgccttcagcacgttggatgggcgtcccagtgcacacgattttgataattccccggtacttcaggactgggtaactgccaccgatattcgtgtagcttttagcagattacacacgttcggagatgagaacgaagacgactctgagctggctagagatagctatttttacgctgtcagtgaccttcaggtgggggggagatgtaaatgtaacggacacgctgctagatgcgtgagggatcgtgatgactccctggtatgcgattgtcgtcataataccgctggtcccgagtgtgatagatgtaaaccattccattacgaccgtccctggcaacgtgcgacagcgagagaggctaatgaatgtgttgcatgtaactgcaaccttcatgccagacgttgcagattcaacatggaactatataaactatccggtagaaagtctggtggtgtgtgcctgaattgtcgtcataacaccgcgggacgtcactgccattactgcaaagagggatattacagggacatggggaagcccattactcacaggaaggcctgtaaggcatgcgactgtcacccggtaggcgctgctggaaagacatgtaaccagacaacgggccaatgtccttgtaaagacggagtcaccgggataacatgtaacagatgtgcgaaaggataccagcaaagcaggagtcccattgcaccgtgtattaaaatcccggtggccccgcccacaaccgcagcaagctccgtagaggagccggaagattgcgattcttattgtaaggcaagcaagggaaagttgaagattaacatgaagaagtactgcaaaaaagactacgctgttcaaatacacatcctgaaagctgacaaagcgggtgactggtggaaatttactgttaacattatcagtgtatataaacaagggaccagtcgtataaggcgtggtgaccagtctctgtggattagatctcgtgacatagcgtgcaagtgtcctaagatcaagccgttaaagaagtacttactactaggaaacgccgaggacagtcccgaccaaagcggtatagtagctgacaagagtagtctagtaattcaatggcgtgatacctgggcccgtagattaaggaaattccagcaaagagaaaagaaaggtaaatgtaaaaaggca

SEQ ID NO: 4110 - DNA, 1659 bp, Homo Sapiens
gacccatgccatgatgagggcggtgcgccgaggggatgtgtgcctggtctagtaaatgccgcgctaggaagagaggttttggcgagctccacctgtgggaggcccgcaacacgtgcgtgcgatgcctcagacccccgtcgtgcccatagtcctgctttgctgacatcaccgggaggcacggccagtcctctatgttggaggagtgaatctctgccgcgtgcccccttaaatgtaacccttacagtccctttggggaaagcgtttgaattagtctttgttagcttgaggttttgctcagctcctccagcttccgtggccttacttaaatctcaagatcacggtcgttcttgggctcccttgggctttttctcttcccactgcgacctagattatggcagactaccagctcctgcgaatggaccggcagggccaggtccagaagcgttgtgttttccagctccacttgcgcagccagacggtagcggcttgttggcgttctctatgcaggacagttccccgccaggtttagacctagattcatccccggtactacaagattgggttacggcaacagatgttagagtcgtcttaaccagaccttctactgcgggcgatcccagagacatggaagctgttgtgccctactcttacgccgcgacggatttgcaagtaggtggcaggtgcaagtgcaacggtcatgcctcaagatgcttgttagacacgcaagggcatttgatttgtgattgcagacacggcacggaaggtccagactgtggacgttgtaagccattctattgtgacagaccttggcaaagggcaacagcgcgtgaaagccacgcgtgtctggcttgcagctgtaatgggcacgctaggaggtgcaggtttaatatggaactgtacaggctgtctggtagaagatcaggcggagtttgcctgaactgtaggcataataccgccggtagacactgccattattgccgtgagggtttctaccgtgacccgggcagggcgctgtccgacagaagggcctgtagagcatgcgactgtcacccggtaggcgcggcgggaaaaacgtgtaatcaaaccacaggccagtgtccatgcaaggacggcgtaactgggttgacatgtaatagatgcgcgccaggatttcagcagtctagatctccagttgcgccctgtgtcaaaactccgatcccgggaccgacggaagattcaagtccggtacaaccacaggactgcgattcacattgtaagccggctagagggtcctaccgtatctctctaaagaaattttgcaaaaaagactatgctgtgcaagttgctgtcggcgctagaggtgaagccagaggagcgtggacgcgttttccagtcgcagtactagccgtctttagaagtggagaggaaagggcgcgtaggggcagtagcgccttgtgggtgcccgccggagatgcagcatgtgggtgtccacgtctgctgccagggaggcgttatctactacttggagggggtccaggagcagcagcagggggcgctggtggacgtgggccaggtctaatcgctgccagaggtagtctggttttaccgtggagagatgcatggactagacgtctaagaagattgcaaaggagggaacgtcgtggaagatgttccgcagcg

SEQ ID NO: 4111 - DNA, 1830 bp, Homo Sapiens
ggactgagtggagtagctggagtgagttcccgctgtgaaaaagcctgcaaccctcggatgggaaatttggctttggggcgaaaactctgggcagacaccacctgcggtcagaatgctaccgaactgtactgcttctacagtgagaacacggatctgacttgtcggcagcccaaatgtgacaagtgcaatgctgcctatcctcacctggctcacctgccatctgccatggcagactcatccttccggtttcctcgcacatggtggcagtctgcggaggatgtgcacagagaaaagatccagttagacctggaagctgaattctacttcactcacctaattgtgatgttcaagtcccccaggccggctgccatggtgctggaccgctcccaggactttgggaaaacatggaagccttataagtactttgcgactaactgctccgctacatttggcctggaagatgatgttgtcaagaagggcgctatttgtacttctaaatactccagtccttttccatgcactggaggagaggttattttcaaagctttgtcaccaccatacgatacagagaacccttacagtgccaaagttcaggagcagctgaagatcaccaaccttcgcgtgcagctgctgaaacgacagtcttgtccctgtcagagaaatgacctgaacgaagagcctcaacattttacacactatgcaatctatgatttcattgtcaagggcagctgcttctgcaatggccacgctgatcaatgcatacctgttcatggcttcagacctgtcaaggccccaggaacattccacatggtccatgggaagtgtatgtgtaagcacaacacagcaggcagccactgccagcactgtgccccgttatacaatgaccggccatgggaggcagctgatggcaaaacgggggctcccaacgagtgcagaacctgcaagtgtaatgggcatgctgatacctgtcacttcgacgttaatgtgtgggaggcatcagggaatcgtagtggtggtgtctgtgatgactgtcagcacaacacagaaggacagtattgccagaggtgcaagccaggcttctatcgtgacctgcggagacccttctcagctccagatgcttgcaaaccgtgttcctgccatccagtaggatcagctgtccttcctgccaactcagtgaccttctgcgaccccagcaatggtgactgcccttgcaagcctggggtggcagggcgacgttgtgacaggtgcatggtgggatactggggcttcggagactatggctgtcgaccatgtgactgtgcggggagctgtgaccctatcaccggagactgcatcagcagccacacagacatagactggtatcatgaagttcctgacttccgtcccgtgcacaataagagcgaaccagcctgggagtgggaggatgcgcaggggttttctgcacttctacactcaggtaaatgcgaatgtaaggaacagacattaggaaatgccaaggcattctgtggaatgaaatattcatatgtgctaaaaataaagattttatcagctcatgataaaggtactcatgttgaggtcaatgtgaagattaaaaaggtcttaaaatctaccaaactgaagattttccgaggaaagcgaacattatatccagaatcatggacggacagaggatgcacttgtccaatcctcaatcctggtttggaataccttgtagcaggacatgaggatataagaacaggcaaactaattgtgaatatgaaaagctttgtccagcactggaaaccttctcttggaagaaaagtcatggatattttaaaaagagagtgcaag

SEQ ID NO: 4112 - DNA, 1419 bp, Homo Sapiens
gacccatgctacgatccacagggccgcccccaattctgcctcccgccagtgacacagctggctgccgtggcggcctcctgccctcaggcctgtgccctgtccccaggaaaccaccttggcgccagggaaacctgcaatggcagcctgactttggccctgggtggccccttcctcctgacatctgtcagcttgcgcttctgtaccccaggacccccagccctcatcctgtctgctgcctgggcctcagggggtccctggaggctgctgtggcacaggcccgcctggcctggggccttagggggccctgaaagggtgaccttccactccacaccaggtcctaaggccactgtggcggccagccacctccgtgtggagtttgggggccaggccgggctagcggcagctgggctgagaggccgctgccagtgtcatggccacgctgcccgctgtgccgcccgtgcccggcccccccgctgccactgccgccaccataccactggcccggggtgcgagagctgccgcccgtcccatcgagactggccctggcggcctgccacgccccggcacccccacccttgcctaccctgctcctgcaaccagcacgcccgacgctgccggttcaactctgagctgttcagactgtcgggcggccggagtgggggtgtttgtgagcggtgccgccaccacacagctgggcggcactgccactactgccaacctgggttctggagggaccctagccagcctatcttcagccgcagggcctgcagagcctgccagtgccaccctattggggcaacaggaggaacctgcaaccagaccagtgggcagtgcacctgcaagttaggggtcacaggcctgacctgcaaccgctgtggccctggctaccagcagagccgctcccccaggatgccctgccagcgaattccagaggcaacaaccacccttgccactactcctggtgcttatagctctgaccctcagtgtcaaaactactgcaatatgtcggacaccagggtacacatgagccttcggaggtactgccagcaggaccatgttctccgcgcgcaggtgctagcgtccgaggcggcgggcccggcatggcagcggctggccgtgcgcgtgctggccgtttacaagcagcgggcgcagcccgtgcgacgcggcgaccaggacgcctgggtgccccgcgccgacctgacctgcggctgcctgcgcctgcagccaggcaccgactacctgctgctgggcagcgccgtgggcgaccccgaccccacgcgcctcatcctcgaccgccacggcctcgcgctgccatggaggccgcgctgggcccggcccctgaagcggctgcagcaggaggagcgcgccggaggctgccgcggcgtgcgggcacccacacccagccccaggccggagcac

SEQ ID NO: 4113 - DNA, 1143 bp, Homo Sapiens
cattatgatttgtgtaagactcagatttacacggaagaagggaaagtttgggattacatggcctgccagccggaatccacggacatgacaaaatatctgaaagtgaaactcgatcctccggatattacctgtggagaccctcctgagacgttctgtgcaatgggcaatccctacatgtgcaataatgagtgtgatgcgagtacccctgagctggcacacccccctgagctgatgtttgattttgaaggaagacatccctccacattttggcagtctgccacttggaaggagtatcccaagcctctccaggttaacatcactctgtcttggagcaaaaccattgagctaacagacaacatagttattacctttgaatctgggcgtccagaccaaatgatcctggagaagtctctcgattatggacgaacatggcagccctatcagtattatgccacagactgcttagatgcttttcacatggatcctaaatccgtgaaggatttatcacagcatacggtcttagaaatcatttgcacagaagagtactcaacagggtatacaacaaatagcaaaataatccactttgaaatcaaagacaggttcgcgttttttgctggacctcgcctacgcaatatggcttccctctacggacagctggatacaaccaagaaactcagagatttctttacagtcacagacctgaggataaggctgttaagaccagccgttggggaaatatttgtagatgagctacacttggcacgctacttttacgcgatctcagacataaaggtgcgaggaaggtgcaagtgtaatctccatgccactgtatgtgtgtatgacaacagcaaattgacatgcgaatgtgagcacaacactacaggtccagactgtgggaaatgcaagaagaattatcagggccgaccttggagtccaggctcctatctccccatccccaaaggcactgcaaatacctgtatccccagtatttccagtattggtacgaatgtctgcgacaacgagctcctgcactgccagaacggagggacgtgccacaacaacgtgcgctgcctgtgcccggccgcatacacgggcatcctctgcgagaagctgcggtgcgaggaggctggcagctgcggctcc

SEQ ID NO: 4114 - DNA, 1470 bp, Homo Sapiens
gactatgacatctgcaaatcctgggtgaccacagatgagggccccacctgggagttctacgcctgccagcccaaggtgatgcgcctgaaggactacgtcaaggtgaaggtggagccctcaggcatcacatgtggagacccccctgagaggttctgctcccatgagaatccctacctatgcagcaacgagtgtgacgcctccaacccggacctggcccacccgcccaggctcatgttcgacaaggaggaggagggcctggccacctactggcagagcatcacctggagccgctaccccagcccgctggaagccaacatcaccctttcgtggaacaagaccgtggagctgaccgacgacgtggtgatgaccttcgagtacggccggcccacggtcatggtcctggagaagtccctggacaacgggcgcacctggcagccctaccagttctacgccgaggactgcatggaggccttcggtatgtccgcccgccgggcccgcgacatgtcatcctccagcgcgcaccgcgtgctctgcaccgaggagtactcgcgctgggcaggctccaagaaggagaagcacgtgcgcttcgaggtgcgggaccgcttcgccatctttgccggccccgacctgcgcaacatggacaacctctacacgcggctggagagcgccaagggcctcaaggagttcttcaccctcaccgacctgcgcatgcggctgctgcgcccggcgctgggcggcacctatgtgcagcgggagaacctctacaagtacttctacgccatctccaacatcgaggtcatcggcaggtgcaagtgcaacctgcatgccaacctgtgctccatgcgcgagggcagcctgcagtgcgagtgcgagcacaacaccaccggccccgactgcggcaagtgcaagaagaatttccgcacccggtcctggcgggccggctcctacctgccgctgccccatggctctcccaacgcctgtgccgctgcaggttcctttggcaactgcgaatgctacggtcactccaaccgctgcagctacattgacttcctgaatgtggtgacctgcgtcagctgcaagcacaacacgcgaggtcagcactgccagcactgccggctgggctactaccgcaacggctcggcagagctggatgatgagaacgtctgcattgagtgtaactgcaaccagataggctccgtgcacgaccggtgcaacgagaccggcttctgcgagtgccgcgagggcgcggcgggccccaagtgcgacgactgcctccccacgcactactggcgccagggctgctaccccaacgtgtgcgacgacgaccagctgctgtgccagaacggaggcacctgcctgcagaaccagcgctgcgcctgcccgcgcggctacaccggcgtgcgctgcgagcagccccgctgcgaccccgccgacgatgacggcggtctggactgcgaccgcgcgcccggg

SEQ ID NO: 4115 - DNA, 1173 bp, Homo Sapiens
gccgcaccctgccccgatgcctgctgcccccacggctcctcgggactgcgatgcacccgggatggggccctggatagcctccaccacctgcccggcgcagagaacctgactgagctctacatcgagaaccagcagcatctgcagcatctggagctccgtgatctgaggggcctgggggagctgagaaacctcaccatcgtgaagagtggtctccgtttcgtggcgccagatgccttccatttcactcctcggctcagtcgcctgaatctctccttcaacgctctggagtctctctcctggaaaactgtgcagggcctctccttacaggaactggtcctgtcggggaaccctctgcactgttcttgtgccctgcgctggctacagcgctgggaggaggagggactgggcggagtgcctgaacagaagctgcagtgtcatgggcaagggcccctggcccacatgcccaatgccagctgtggtgtgcccacgctgaaggtccaggtgcccaatgcctcggtggatgtgggggacgacgtgctgctgcggtgccaggtggaggggcggggcctggagcaggccggctggatcctcacagagctggagcagtcagccacggtgatgaaatctgggggtctgccatccctggggctgaccctggccaatgtcaccagtgacctcaacaggaagaacgtgacgtgctgggcagagaacgatgtgggccgggcagaggtctctgttcaggtcaacgtctccttcccggccagtgtgcagctgcacacggcggtggagatgcaccactggtgcatccccttctctgtggatgggcagccggcaccgtctctgcgctggctcttcaatggctccgtgctcaatgagaccagcttcatcttcactgagttcctggagccggcagccaatgagaccgtgcggcacgggtgtctgcgcctcaaccagcccacccacgtcaacaacggcaactacacgctgctggctgccaaccccttcggccaggcctccgcctccatcatggctgccttcatggacaaccctttcgagttcaaccccgaggaccccatccctgtctccttctcgccggtggacactaacagcacatctggagacccggtggagaagaaggacgaaacaccttttggggtctcggtggctgtgggc

SEQ ID NO: 4116 - DNA, 1197 bp, Homo Sapiens
tgtcccacgtcctgcaaatgcagtgcctctcggatctggtgcagcgacccttctcctggcatcgtggcatttccgagattggagcctaacagtgtagatcctgagaacatcaccgaaattttcatcgcaaaccagaaaaggttagaaatcatcaacgaagatgatgttgaagcttatgtgggactgagaaatctgacaattgtggattctggattaaaatttgtggctcataaagcatttctgaaaaacagcaacctgcagcacatcaattttacccgaaacaaactgacgagtttgtctaggaaacatttccgtcaccttgacttgtctgaactgatcctggtgggcaatccatttacatgctcctgtgacattatgtggatcaagactctccaagaggctaaatccagtccagacactcaggatttgtactgcctgaatgaaagcagcaagaatattcccctggcaaacctgcagatacccaattgtggtttgccatctgcaaatctggccgcacctaacctcactgtggaggaaggaaagtctatcacattatcctgtagtgtggcaggtgatccggttcctaatatgtattgggatgttggtaacctggtttccaaacatatgaatgaaacaagccacacacagggctccttaaggataactaacatttcatccgatgacagtgggaagcagatctcttgtgtggcggaaaatcttgtaggagaagatcaagattctgtcaacctcactgtgcattttgcaccaactatcacatttctcgaatctccaacctcagaccaccactggtgcattccattcactgtgaaaggcaaccccaaaccagcgcttcagtggttctataacggggcaatattgaatgagtccaaatacatctgtactaaaatacatgttaccaatcacacggagtaccacggctgcctccagctggataatcccactcacatgaacaatggggactacactctaatagccaagaatgagtatgggaaggatgagaaacagatttctgctcacttcatgggctggcctggaattgacgatggtgcaaacccaaattatcctgatgtaatttatgaagattatggaactgcagcgaatgacatcggggacaccacgaacagaagtaatgaaatcccttccacagacgtcactgataaaaccggtcgggaacat

SEQ ID NO: 4117 - DNA, 1194 bp, Homo Sapiens
tgccctgcaaattgtgtctgcagcaagactgagatcaattgccggcggccggacgatgggaacctcttccccctcctggaagggcaggattcagggaacagcaatgggaacgccagtatcaacatcacggacatctcaaggaatatcacttccatacacatagagaactggcgcagtcttcacacgctcaacgccgtggacatggagctctacaccggacttcaaaagctgaccatcaagaactcaggacttcggagcattcagcccagagcctttgccaagaacccccatttgcgttatataaacctgtcaagtaaccggctcaccacactctcgtggcagctcttccagacgctgagtcttcgggaattgcagttggagcagaactttttcaactgcagctgtgacatccgctggatgcagctctggcaggagcagggggaggccaagctcaacagccagaacctctactgcatcaacgctgatggctcccagcttcctctcttccgcatgaacatcagtcagtgtgaccttcctgagatcagcgtgagccacgtcaacctgaccgtacgagagggtgacaatgctgttatcacttgcaatggctctggatcaccccttcctgatgtggactggatagtcactgggctgcagtccatcaacactcaccagaccaatctgaactggaccaatgttcatgccatcaacttgacgctggtgaatgtgacgagtgaggacaatggcttcaccctgacgtgcattgcagagaacgtggtgggcatgagcaatgccagtgttgccctcactgtctactatcccccacgtgtggtgagcctggaggagcctgagctgcgcctggagcactgcatcgagtttgtggtgcgtggcaaccccccaccaacgctgcactggctgcacaatgggcagcctctgcgggagtccaagatcatccatgtggaatactaccaagagggagagatttccgagggctgcctgctcttcaacaagcccacccactacaacaatggcaactataccctcattgccaaaaacccactgggcacagccaaccagaccatcaatggccacttcctcaaggagccctttccagagagcacggataactttatcttgtttgacgaagtgagtcccacacctcctatcactgtgacccacaaaccagaagaagacact

SEQ ID NO: 4118 - DNA, 1215 bp, Homo Sapiens
atgtcctccccagcactgacggcaggtgcttcaggaaaggtgatggacttcaacaatggcacctacctggtcagcttcactctgttctgggagggccaggtctccctgtctctgctgctcatccaccccagtgaaggggcgtcggctctctggagggcaaggaaccaaggctatgataaaattattttcaaaggcaaatttgttaatggcacctctcatgtcttcactgaatgtggcctgaccctaaactcaaatgctgaactctgtgaatatctggatgacagagaccaagaagccttctattgtatgaagcctcaacacatgccctgtgaggctctgacctacatgaccacccggaatagagaggtatcttatcttacagacaaggaaaacagccttttccacaggtccaaagtgggagttgaaatgatgaaggatcgtaaacacattgatgtcactaattgtaacaagagagaaaaaatagaagagacatgccaagttggaatgaagcctcctgtccctggtggttatactttacaaggaaaatggataacaacattttgcaaccaggttcagttagacacaattaagataaatggctgtttgaaaggcaaactcatttacctcctgggagactctacactacgtcagtggatctactacttccccaaagttgtaaaaacactgaagttttttgatcttcatgaaactggaatctttaagaaacatttgcttctggatgcagaaagacacactcagattcaatggaaaaaacatagctatcccttcgtcactttccagctctactctctgatagatcatgattatatccctcgggaaattgaccggctatcaggtgacaaaaacacagccatcgtcatcacctttggccagcactttagaccatttcccattgacatttttattcgcagggccatcggtgttcaaaaggctattgaaagactgttcctaagaagcccagccactaaagtgattattaagacagaaaacatcagggagatgcacatagagacagagaggtttgtagacttccatggttatattcactatcttatcatgaaggatattttcaaagacctcaacgtgggcatcattgatgcctgggacatgaccattgcatatggcactgacactatccacccacctgatcatgtgattggaaatcagattaacatgttcttaaactacatttgc

SEQ ID NO: 4119 - DNA, 1587 bp, Homo Sapiens
gagtacttggaccatgagactgtttcagccactttcatcgacagcagtggacagtttgtttcctcccaggtgacaggaattagccgaaatccctactgtggctatgatcagcagaccctgtccagccaggagcgcatggaggaggactccttgctggctgccttgcaccggcaggttcctgatgtgggcccagtcccctttgtgaagagcactgacccttcttccagctactttgtcatcttgaactctgctgccttctttaaggtgggaagccagcttgaggtgctggttcatgtgcaggattttcaaagaaagcccaagaagtatggtggagactacctgcaggccagaattcactccctcaagctgcaggctggggctgtgggcagggtggtggattaccagaatgggttttacaaggttttctttactttgctatggccaggcaaagttaaagtatccgtatctctggtccaccccagtgaagggatcagagttcttcagcgcttacaggaagataaaccagacagggtctatttcaagagtctcttccgttcaggaagaatttctgaaactactgagtgcaacgtgtgtcttcctgggaatctgcccctgtgtaactttacagacctctacactggggagccctggttctgcttcaaaccaaagaagctcccttgcagcagcagaattacccatttcaaaggtggatacctgaaaggtctcctaaccgctgcagagagtgctttcttccagagtggtgtcaatatcaaaatgccagtcaactccagtggacctgattgggtaactgtgattcccaggagaataaaagaaactaacagtctagaactatctcaaggctcaggaacttttccttctgggtattattataaagaccagtggaggcccagaaagtttaagatgcgtcagtttaatgaccctgacaacattacagagtgcttacaaagaaaagtggtgcatttatttggtgactcaacaatcaggcaatggtttgaataccttactacatttgttccagatttagtggagtttaacttgggtagtcccaagaatgtgggtcccttccttgcagtggaccagaagcacaacatcctgctcaaataccgctgccatggtccacccatccgcttcacgactgtctttagcaatgagctccattatgtggcgaatgagctgaatggcattgtgggagggaagaacacagtggttgccatagctgtatggtctcacttcagcaccttccctttggaagtgtacatccggcggctcaggaacatccgtcgagcagtggttcggctcctcgatcgaagcccaaagaccgtggtggtcatccggacggccaacgcccaagagctgggacctgaggtgagccttttcaacagcgactggtacaactttcagctggacaccatccttcggaggatgttctcaggggttggagtatatctcgtcgatgcctgggagatgaccctggcccattatctaccgcacaagctgcatccagatgaagttattgtgaagaaccagctggacatgttcttgtcctttgtgtgccccttggaaacc

SEQ ID NO: 4120 - DNA, 1551 bp, Homo Sapiens
caaaattcaacgaaagtgtggtcagccctgaacctatccatcagcctgcattattggaacaactccacaaagtccctatttcctaagacgcctttaatctctctgaagcctcttacggaaactgaactgcgtattaaagagataatagaaaagctggatcaacaaatcccaccgaggccgttcactcacgtgaacaccaccacaagtgctacccactccacggccacaatccttaatcctcgtgacacgtactgcaggggtgaccagttgcacatattattggaggttcgtgaccatctaggcaggaggaaacagtatggcggtgatttcttgagggcaagaatgagctctccggcgttaatggccggagccagtggtaaagtcacagactttaacaacgggacctatttagtaagcttcacgctgttttgggaaggtcaagtcagcctaagcctgctgctgatccacccaagcgagggcgtatctgccctgtggtcagcgaggaatcagggctacgatagagtcatatttactggccagttcgttaatgggacctcccaggtacacagtgaatgtgggttaattcttaatacaaacgccgaactatgccaatacttagacaacagggatcaggagggattctactgcgtacgtcctcagcatatgccctgcgctgcacttacgcatatgtatagcaaaaacaagaaagtttcttatttatccaaacaagaaaagtccctgttcgagaggtctaatgttggtgttgagatcatggaaaaatttaataccatctctgtgagcaagtgtaataaagaaacggttgcaatgaaagaaaagtgcaaattcggtatgacaagtacgattcccagtggacacgtttggcgtaatacatggaatccagtatcctgctcattagccaccgtgaagatgaaggagtgcctacgtggcaagttgatatatctgatgggggacagcacaataagacaatggatggagtattttaaagcttctatcaatacgttgaagtcagtggatctgcatgagagtggtaagttacagcaccaactggccgttgatctggataggaacattaacatccagtggcaaaagtactgctaccccttaattggatctatgacttatagcgtaaaagaaatggaatatttaactagggctatcgataggaccggtggtgagaaaaatactgtcatcgtaatctcattaggccaacattttaggccattccctatcgacgtgtttatcaggcgtgctttaaacgttcataaagcgattcaacatttgctgctgaggagccccgatacaatggtaattatcaaaacagagaacattagggaaatgtacaacgacgctgaaaggttctccgactttcacggttatattcaatatctgatcattaaagatatattccaggacttatcagtttccatcatcgatgcctgggatataactatcgcttatggcacgaacaacgtgcatcccccgcagcatgtggtcggaaatcagataaacattctattgaattacatttgt

SEQ ID NO: 4121 - DNA, 1374 bp, Homo Sapiens
gtgggggcctgcgcccgcgcttgtcccgccgcctgcgcctgcagcaccgtggagcgcggctgctcggtgcgctgcgaccgcgcgggcctcctgcgggtgccggccgagctcccgtgcgaggcggtctccatcgacctggaccggaacggcctgcgcttcctgggcgagcgagccttcggcacgctgccgtccttgcgccgcctgtcgctgcgccacaacaacctgtccttcatcacgcccggcgccttcaagggcctgccgcgcctggctgagctgcgcctggcgcacaacggcgacctgcgctacctgcacgcgcgcaccttcgcggcgctcagccgcctgcgccgcctagacctagcagcctgccgcctcttcagcgtgcccgagcgcctcctggccgaactgccggccctgcgcgaactcgccgccttcgacaacctgttccgccgcgtgccgggcgcgctgcgcggcctggccaacctgacgcacgcgcacctggagcgcggccgcatcgaggcggtggcctccagctcgctgcagggcctgcgccgcctgcgctcgctcagcctgcaggccaaccgcgtccgtgccgtgcacgctggcgccttcggggactgtggcgtcctggagcatctgctgctcaacgacaacctgctggccgagctcccggccgacgccttccgcggcctgcggcgcctgcgcacgctcaacctgggtggcaacgcgctggaccgcgtggcgcgcgcctggttcgctgacctggccgagctcgagctgctctacctggaccgcaacagcatcgccttcgtggaggagggcgccttccagaacctctcgggtctcctcgcgctgcacctcaacggcaaccgcctcaccgtgctcgcctgggtcgccttccagcccggcttcttcctgggccgcctcttcctcttccgcaacccgtggtgctgcgactgccgtctggagtggctgagggactggatggagggctccggacgtgtcaccgacgtgccgtgcgcctccccgggctccgtggccggcctggacctcagccaggtgaccttcgggcgctcctccgatggcctctgtgtggaccccgaggagctgaacctcaccacgtccagtccaggcccgtccccagaaccagcggccaccaccgtgagcaggttcagcagcctcctctccaagctgctggccccgagggtcccggtggaggaggcggccaacaccactggggggctggccaacgcctccctgtccgacagcctctcctcccgtggggtgggaggcgcgggccggcagccctggtttctcctcgcctcttgtctcctgcccagcgtggcccagcacgtggtgtttggcctgcagatggac

SEQ ID NO: 4122 - DNA, 834 bp, Homo Sapiens
ccaccaacccagcaggactcacgcattatctatgattatggaacagataattttgaagaatccatatttagccaagattatgaggataaatacctggatggaaaaaatattaaggaaaaagaaactgtgataatacccaatgagaaaagtcttcaattacaaaaagatgaggcaataacaccattacctcccaagaaagaaaatgatgaaatgcccacgtgtctgctgtgtgtttgtttaagtggctctgtatactgtgaagaagttgacattgatgctgtaccacccttaccaaaggaatcagcctatctttacgcacgattcaacaaaattaaaaagctgactgccaaagattttgcagacatacctaacttaagaagactcgattttacaggaaatttgatagaagatatagaagatggtactttttcaaaactttctctgttagaagaactttcacttgctgaaaatcaactactaaaacttccagttcttcctcccaagctcactttatttaatgcaaaatacaacaaaatcaagagtaggggaatcaaagcaaatgcattcaaaaaactgaataacctcaccttcctctacttggaccataatgccctggaatccgtgcctcttaatttaccagaaagtctacgtgtaattcatcttcagttcaacaacatagcttcaattacagatgacacattctgcaaggctaatgacaccagttacatccgggaccgcattgaagagatacgcctggagggcaatccaatcgtcctgggaaagcatccaaacagttttatttgcttaaaaagattaccgatagggtcatacttt

SEQ ID NO: 4123 - DNA, 1569 bp, Homo Sapiens
gacccctgttctgcctatataagtcttaacgagccgtggaggaatacggatcaccaattggatgaaagtcaggggccaccactgtgcgataaccacgtaaacggcgagtggtaccatttcactgggatggctggagatgcgatgcccacattctgtattcccgagaatcactgcggtacacacgccccggtatggttgaatgggagtcatcccctagagggcgacggcatcgtacaaaggcaagcgtgtgcatcatttaacgggaactgttgcctttggaacacgaccgttgaggtgaaagcttgccccggcgggtattacgtctaccgtctaacaaagcccagcgtttgttttcatgtgtattgtgggcatttttacgacatctgcgatgaggactgccacggctcctgttccgacacttccgaatgtacgtgcgccccagggactgtattgggccccgaccgtcagacttgtttcgacgaaaacgagtgtgaacagaacaacggtggatgctctgagatttgtgtcaatctgaagaacagttatcgttgtgaatgcggagtgggccgtgtcctgcgtagcgacggcaagacgtgcgaagacgtcgaggggtgccataacaataatggcggctgtagtcactcttgtttaggatcagaaaaaggctatcaatgcgagtgtccgagggggcttgttttatctgaggataatcacacatgccaagttcccgttttatgtaaaagcaacgccatagaagtaaatattcctagagagctggtgggtgggctggagctgtttctgaccaataccagttgtagaggagtctctaatggtacgcacgtaaatattctttttagtcttaaaacttgtggaaccgtggtagacgttgttaatgataagatagtagcatctaacttggtgactgggttgccaaaacagacaccagggagttctggtgatttcatcataagaacatctaaactattaattccggttacttgtgaattccccagactgtataccatatcagaaggttatgtgcccaatttgagaaatagcccgttggagattatgagtcgtaaccacgggatatttccgttcaccttagaaattttcaaagacaatgaatttgaagaaccatatcgtgaagcattgcccactttgaaactacgtgattcattgtactttggcatcgagccagtcgtccatgttagcggcttggaatcccttgttgagtcttgcttcgcgacacccacatccaagatcgacgaggtacttaaatattatttaatccgtgacgggtgcgtgtccgacgattccgtaaagcagtatacaagcagagaccatcttgcgaaacattttcaggtcccggtcttcaaatttgttggtaaagaccacaaagaagtgttcctacactgtcgtgtgcttgtctgtggcgtactagatgagaggtcccgttgtgcacaaggatgtcatagaagaatgaggcgtggtgccggcggggaggattccgctggtctgcaaggacagactcttacgggtggcccgattcgtatcgattgggaggat

SEQ ID NO: 4124 - DNA, 648 bp, Homo Sapiens
atgcaattatcccaggtgtctgacctcctaacacaagagcaagcaaacctaactcaccagaaaaagaaactggagggacagatctcagcccggcaacaagcagaagaagcttcacaggagtcagaaaacgaactcaaggaaatgatagaaacccttgctcggaagctgaatgagaaatccaaagagcaaatggaacttcaccaccagaatctgaatctccaagaaacactgaagagagtagcaaattgttcagctccttgtccgcaagactggatctggcatggagaaaactgttacctattttcctcgggctcatttaactgggaaaagagccaagagaagtgcttgtctttggatgccaagttgctgaaaattaatagcacagctgatctggacttcatccagcaagcaatttcctattccagttttccattctggatggggctgtctcggaggaaccccagctacccatggctctgggaggacggttctcctttgatgccccacttatttagagtccgaggcgctgtctcccagacatacccttcaggtacctgtgcatatatacaacgaggagctgtttatgcggaaaactgcattttagctgccttcagtatatgtcagaagaaggcaaacctaagagcacag

SEQ ID NO: 4125 - DNA, 1203 bp, Homo Sapiens
caatatgaaacttatcagtgggatgaagactatgaccaagagccagatgatgattaccaaacaggattcccatttcgtcaaaatgtagactacggagttccttttcatcagtatactttaggctgtgtcagtgaatgcttctgtccaactaactttccatcatcaatgtactgtgataatcgcaaactcaagactatcccaaatattccgatgcacattcagcaactctaccttcagttcaatgaaattgaggctgtgactgcaaattcattcatcaatgcaactcatcttaaagaaattaacctcagccacaacaaaattaaatctcaaaagattgattatggtgtgtttgctaagcttccaaatctactacaacttcatctagagcataataatttagaagaatttccatttcctcttcctaaatctctggaaagactccttcttggttacaatgaaatctccaaactgcagacaaatgctatggatgggctagtaaacttgaccatgcttgatctctgttataattatcttcatgattctctgctaaaagacaaaatctttgccaaaatggaaaaactaatgcagctcaacctctgcagtaacagattagaatcaatgcctcctggtttgccttcttcacttatgtatctgtctttagaaaataattcaatttcttctatacccgaaaaatacttcgacaaacttccaaaacttcatactctaagaatgtcacacaacaaactacaagacatcccatataatatttttaatcttcccaacattgtagaactcagtgttggacacaacaaattgaagcaagcattctatattccaagaaatttggaacacctatacctacaaaataatgaaatagaaaagatgaatcttacagtgatgtgtccttctattgacccactacattaccaccatttaacatacattcgtgtggaccaaaataaactaaaagaaccaataagctcatacatcttcttctgcttccctcatatacacactatttattatggtgaacaacgaagcactaatggtcaaacaatacaactaaagacacaagttttcaggagatttccagatgatgatgatgaaagtgaagatcacgatgatcctgacaatgctcatgagagcccagaacaagaaggagcagaagggcactttgaccttcattattatgaaaatcaagaa

SEQ ID NO: 4126 - DNA, 1179 bp, Homo Sapiens
atttgtcctctccaatgtatatgcacagagaggcacaggcatgtggactgttcaggcagaaacttgtctacattaccatctggactgcaagagaatattatacatttaaacctgtcttataaccactttactgatctgcataaccagttaacccaatataccaatctgaggaccctggacatttcaaacaacaggcttgaaagcctgcctgctcacttacctcggtctctgtggaacatgtctgctgctaacaacaacattaaacttcttgacaaatctgatactgcttatcagtggaatcttaaatatctggatgtttctaagaacatgctggaaaaggttgtcctcattaaaaatacactaagaagtctcgaggttctcaacctcagtagtaacaaactttggacagttccaaccaacatgccctccaaactacatatcgtggacctgtctaataattctttgacacaaattcttccaggtacattaataaacctgacaaatctcacacatctttacctgcacaacaataagttcacattcattccagaccaatcttttgaccaactctttcagttgcaagagataaccctttacaataacaggtggtcatgtgaccacaaacaaaacattacttacttactgaagtggatgatggaaacaaaagcccatgtgatagggactccatgttctacccaaatatcatctttaaaggaacataacatgtatcccacaccttctggatttacctcaagcttattcactgtaagtgggatgcagacagtggacaccattaactctctgagtgtggtaactcaacccaaagtgaccaaaatacccaaacaatatcgaacaaaggaaacaacgtttggtgccactctaagcaaagacaccacctttactagcactgataaggcttttgtgccctatccagaagatacatccacagagactatcaattcacatgaagcagcagctgcaactctaactattcatctccaagatggaatggtcacaaacacaagcctcactagctcaacaaaatcatccccaacacccatgaccctaagtatcactagtggcatgccaaataatttctctgaaatgcctcaacaaagcacaacccttaacttatggagggaagagacaaccacaaatgtaaagactccattaccttct

SEQ ID NO: 4127 - DNA, 885 bp, Homo Sapiens
ggagtgcccgtgcgcagcggagatgccaccttccccaaagctatggacaacgtgacggtccggcagggggagagcgccaccctcaggtgtaccatagatgaccgggtaacccgggtggcctggctaaaccgcagcaccatcctctacgctgggaatgacaagtggtccatagaccctcgtgtgatcatcctggtcaatacaccaacccagtacagcatcatgatccaaaatgtggatgtgtatgacgaaggtccgtacacctgctctgtgcagacagacaatcatcccaaaacgtcccgggttcacctaatagtgcaagttcctcctcagatcatgaatatctcctcagacatcactgtgaatgagggaagcagtgtgaccctgctgtgtcttgctattggcagaccagagccaactgtgacatggagacacctgtcagtcaaggaaggccagggctttgtaagtgaggatgagtacctggagatctctgacatcaagcgagaccagtccggggagtacgaatgcagcgcgttgaacgatgtcgctgcgcccgatgtgcggaaagtaaaaatcactgtaaactatcctccctatatctcaaaagccaagaacactggtgtttcagtcggtcagaagggcatcctgagctgtgaagcctctgcagtccccatggctgaattccagtggttcaaggaagaaaccaggttagccactggtctggatggaatgaggattgaaaacaaaggccgcatgtccactctgactttcttcaatgtttcagaaaaggattatgggaactatacttgtgtggccacgaacaagcttgggaacaccaatgccagcatcacattgtatgggcctggagcagtcattgatggtgtaaac

SEQ ID NO: 4128 - DNA, 939 bp, Homo Sapiens
gcttctctcccaaggaaggagaggaagaggagagaggagcagatgcccagggaaggcgattcctttgaagttctgcctctgcggaatgatgtcctgaacccagacaactatggtgaagtcattgacctgagcaactatgaggagctcacagattatggggaccaactccccgaggttaaggtgactagcctcgctcctgcaaccagcatcagtcccgccaagagcactacggctccagggacaccctcgtcaaaccccacgatgaccagacctactacagcagggctgctactgagttcccagcccaaccatggtctgcccacctgcctggtctgcgtgtgcctcggttcctctgtgtattgcgatgacattgacctagaggacattcctcctcttcctcggaggactgcctacctgtatgcacgcttcaaccgcatcagccgtatcagggccgaagacttcaaagggctgacaaagttgaagaggattgacctctccaacaacctcatttcctccatcgataatgatgccttccgcctgctacatgccctccaggacctcatcctcccagagaaccagttggaagctctgcccgtgctgcccagtggcattgagttcctggatgtccgcctaaatcggctccagagctcggggatacagcctgcagccttcagggcaatggagaagctgcagttcctttacctgtcagacaacctgctggattctatcccagggcctttgcccctgagcctgcgctctgtacacctgcagaataacctgatagagaccatgcagagagacgtcttctgtgaccccgaggagcacaaacacacccgcaggcagctggaagacatccgcctggatggcaaccccatcaacctcagcctcttccccagcgcctacttctgcctgcctcggctccccatcggccgcttcacg

SEQ ID NO: 4129 - DNA, 792 bp, Homo Sapiens
gacatcactccgtctgtccccccagcttcataccaccctaagccatggctgggagctcagccggctacagttgtgacccctggggtcaacgtgaccttgagatgccgggcaccccaacccgcttggagatttggacttttcaagcctggagagatcgctccccttctcttccgggatgtgtcctccgagctggcagaattctttctggaggaggtgactccagcccaagggggaagttaccgctgctgctaccgaaggccagactgggggccgggtgtctggtcccagcccagcgatgtcctggagctgctggtgacagaggagctgccgcggccgtcgctggtggcgctgcccgggccggtggtgggtcctggcgccaacgtgagcctgcgctgcgcgggccgcctgcggaacatgagcttcgtgctgtaccgcgagggcgtggcggccccgctgcagtaccgccactccgcgcagccctgggccgacttcacgctgctgggcgcccgcgcccccggcacctacagctgctactatcacacgccctccgcgccctacgtgctgtcgcagcgcagcgaggtactggtcatcagctgggaaggtgagggccctgaggcccggcccgcctcctccgccccaggaatgcaggccccaggacctccgccctcagacccaggagcccaggcccccagcctctcctccttcagacccaggggtctagtcctgcagcccctcctccctcagacccaggattcctgggacccagcccctcctccctcagatccaggagtc

SEQ ID NO: 4130 - DNA, 2139 bp, Homo Sapiens
gaacgtttaccattgactcctgtatcacttaaagtttccaccaattctacgcgtcagagtttgcacttacaatggactgtccacaaccttccttatcatcaggaattgaaaatggtatttcagatccagatcagtaggattgaaacatccaatgtcatctgggtggggaattacagcaccactgtgaagtggaaccaggttctgcattggagctgggaatctgagctccctttggaatgtgccacacactttgtaagaataaagagtttggtggacgatgccaagttccctgagccaaatttctggagcaactggagttcctgggaggaagtcagtgtacaagattctactggacaggatatattgttcgttttccctaaagataagctggtggaagaaggcaccaatgttaccatttgttacgtttctaggaacattcaaaataatgtatcctgttatttggaagggaaacagattcatggagaacaacttgatccacatgtaactgcattcaacttgaatagtgtgcctttcattaggaataaagggacaaatatctattgtgaggcaagtcaaggaaatgtcagtgaaggcatgaaaggcatcgttctttttgtctcaaaagtacttgaggagcccaaggacttttcttgtgaaaccgaggacttcaagactttgcactgtacttgggatcctgggacggacactgccttggggtggtctaaacaaccttcccaaagctacactttatttgaatcattttctggggaaaagaaactttgtacacacaaaaactggtgtaattggcaaataactcaagactcacaagaaacctataacttcacactcatagctgaaaattacttaaggaagagaagtgtcaatatcctttttaacctgactcatcgagtttatttaatgaatccttttagtgtcaactttgaaaatgtaaatgccacaaatgccatcatgacctggaaggtgcactccataaggaataatttcacatatttgtgtcagattgaactccatggtgaaggaaaaatgatgcaatacaatgtttccatcaaggtgaacggtgagtacttcttaagtgaactggaacctgccacagagtacatggcgcgagtacggtgtgctgatgccagccacttctggaaatggagtgaatggagtggtcagaacttcaccacacttgaagctgctccctcagaggcccctgatgtctggagaattgtgagcttggagccaggaaatcatactgtgaccttattctggaagccattatcaaaactgcatgccaatggaaagatcctgttctataatgtagttgtagaaaacctagacaaaccatccagttcagagctccattccattccagcaccagccaacagcacaaaactaatccttgacaggtgttcctaccaaatctgcgtcatagccaacaacagtgtgggtgcttctcctgcttctgtaatagtcatctctgcagaccccgaaaacaaagaggttgaggaagaaagaattgcaggcacagagggtggattctctctgtcttggaaaccccaacctggagatgttataggctatgttgtggactggtgtgaccatacccaggatgtgctcggtgatttccagtggaagaatgtaggtcccaataccacaagcacagtcattagcacagatgcttttaggccaggagttcgatatgacttcagaatttatgggttatctacaaaaaggattgcttgtttattagagaaaaaaacaggatactctcaggaacttgctccttcagacaaccctcacgtgctggtggatacattgacatcccactccttcactctgagttggaaagattactctactgaatctcaacctggttttatacaagggtaccatgtctatctgaaatccaaggcgaggcagtgccacccacgatttgaaaaggcagttctttcagatggttcagaatgttgcaaatacaaaattgacaacccggaagaaaaggcattgattgtggacaacctaaagccagaatccttctatgagtttttcatcactccattcactagtgctggtgaaggccccagtgctacgttcacgaaggtcacgactccggatgaacactcctcgatg

SEQ ID NO: 4131 - DNA, 2148 bp, Homo Sapiens
ttgccaagagagtacacagtcattaatgaagcctgccctggagcagagtggaatatcatgtgtcgggagtgctgtgaatatgatcagattgagtgcgtctgccccggaaagagggaagtcgtgggttataccatcccttgctgcaggaatgaggagaatgagtgtgactcctgcctgatccacccaggttgtaccatctttgaaaactgcaagagctgccgaaatggctcatgggggggtaccttggatgacttctatgtgaaggggttctactgtgcagagtgccgagcaggctggtacggaggagactgcatgcgatgtggccaggttctgcgagccccaaagggtcagattttgttggaaagctatcccctaaatgctcactgtgaatggaccattcatgctaaacctgggtttgtcatccaactaagatttgtcatgttgagcctggagtttgactacatgtgccagtatgactatgttgaggttcgtgatggagacaaccgcgatggccagatcatcaagcgtgtctgtggcaacgagcggccagctcctatccagagcataggatcctcactccacgtcctcttccactccgatggctccaagaattttgacggtttccatgccatttatgaggagatcacagcatgctcctcatccccttgtttccatgacggcacgtgcgtccttgacaaggctggatcttacaagtgtgcctgcttggcaggctatactgggcagcgctgtgaaaatcttctggaggctgggaagtccaagatcaaggcgtcagaagattcattgtctgtccttgaagaaagaaactgctcagaccctgggggcccagtcaatgggtaccagaaaataacagggggccctgggcttatcaacggacgccatgctaaaattggcaccgtggtgtctttcttttgtaacaactcctatgttcttagtggcaatgagaaaagaacttgccagcagaatggagagtggtcagggaaacagcccatctgcataaaagcctgccgagaaccaaagatttcagacctggtgagaaggagagttcttccgatgcaggttcagtcaagggagacaccattacaccagctatactcagcggccttcagcaagcagaaactgcagagtgcccctaccaagaagccagcccttccctttggagatctgcccatgggataccaacatctgcatacccagctccagtatgagtgcatctcacccttctaccgccgcctgggcagcagcaggaggacatgtctgaggactgggaagtggagtgggcgggcaccatcctgcatccctatctgcgggaaaattgagaacatcactgctccaaagacccaagggttgcgctggccgtggcaggcagccatctacaggaggaccagcggggtgcatgacggcagcctacacaagggagcgtggttcctagtctgcagcggtgccctggtgaatgagcgcactgtggtggtggctgcccactgtgttactgacctggggaaggtcaccatgatcaagacagcagacctgaaagttgttttggggaaattctaccgggatgatgaccgggatgagaagaccatccagagcctacagatttctgctatcattctgcatcccaactatgaccccatcctgcttgatgctgacatcgccatcctgaagctcctagacaaggcccgtatcagcacccgagtccagcccatctgcctcgctgccagtcgggatctcagcacttccttccaggagtcccacatcactgtggctggctggaatgtcctggcagacgtgaggagccctggcttcaagaacgacacactgcgctctggggtggtcagtgtggtggactcgctgctgtgtgaggagcagcatgaggaccatggcatcccagtgagtgtcactgataacatgttctgtgccagctgggaacccactgccccttctgatatctgcactgcagagacaggaggcatcgcggctgtgtccttcccgggacgagcatctcctgagccacgctggcatctgatgggactggtcagctggagctatgataaaacatgcagccacaggctctccactgccttcaccaaggtgctgccttttaaagactggattgaaagaaatatgaaa

SEQ ID NO: 4132 - DNA, 414 bp, Homo Sapiens
atccgctgtcccaaaggctccaaggcctatggctcccactgctatgccttgtttttgtcaccaaaatcctggacagatgcagatctggcctgccagaagcggccctctggaaacctggtgtctgtgctcagtggggctgagggatccttcgtgtcctccctggtgaagagcattggtaacagctactcatacgtctggattgggctccatgaccccacacagggcaccgagcccaatggagaaggttgggagtggagtagcagtgatgtgatgaattactttgcatgggagagaaatccctccaccatctcaagccccggccactgtgcgagcctgtcgagaagcacagcatttctgaggtggaaagattataactgtaatgtgaggttaccctatgtctgcaagttcactgac

SEQ ID NO: 4133 - DNA, 333 bp, Homo Sapiens
gctcccaaggtgaggcggcagagtgacacctggggaccctggagccagtggagcccctgcagccggacctgtggagggggtgtcagcttccgggagcgcccctgctactcccagaggagagatggaggctccagctgcgtgggccccgcccggagccaccgctcttgtcgcacggagagctgccccgacggcgcccgggacttccgggccgagcagtgcgcggagttcgacggagcggagttccaggggcggcggtatcggtggctgccctactacagcgccccaaacaagtgtgaactgaactgcattcccaaagtgctgggattacaggca

SEQ ID NO: 4134 - DNA, 4641 bp, Homo Sapiens
cgggaggcgaggggcgccaccgaggagccgagcccgccgagccgggcgctctatttcagcgggcgaggcgagcagctgcgcctccgggccgacctcgagctgccccgggacgcgttcacgctgcaagtgtggctgcgagcggaggggggccagaggtctccggcagtgatcacagggctgtatgacaaatgttcttatatctcacgtgaccgaggatgggtcgtgggcattcacaccatcagtgaccaagacaacaaagacccacgctactttttctccttgaagacagaccgagcccggcaagtgaccaccatcaatgcccaccgcagctacctcccaggccagtgggtatacctagctgccacctatgatgggcagttcatgaagctctatgtgaatggtgcccaggtggccacctctggggaacaagtgggtggcatattcagcccactgacccagaagtgcaaagtgctcatgttagggggcagtgccctgaatcacaactaccggggctacatcgagcacttcagtctgtggaaggtggccaggactcagcgggagatactgtctgacatggaaacccatggcgcccacactgctctacctcagctcctcctccaggagaactgggacaatgtgaagcatgcctggtcccccatgaaggatggcagcagccccaaagtggaattcagcaatgcccacggctttctgctggacacgagtctggagcctcctctgtgtggacagacattgtgtgacaacacagaggtcattgccagctacaatcagctctcaagtttccgccagcccaaggtggtgcgctaccgcgtggtcaacctctatgaagatgatcataagaacccgacggtgacgcgcgagcaggtggacttccagcaccatcagctggctgaggccttcaagcaatacaacatctcctgggagctggacgtgctggaggtgagcaactcctctcttcgccgccgcctcatcctggccaactgtgacatcagcaagattggggatgagaactgtgaccccgagtgcaaccacacgctgacgggccacgacggcggggattgccgccacctgcgccaccctgccttcgtgaagaagcagcacaacggggtgtgtgacatggactgcaactatgaacggttcaactttgatggtggagagtgctgtgaccctgaaatcaccaatgtcactcagacttgctttgaccccgactctccacacagagcctacttggatgttaatgagctgaagaacattcttaaattggatggatcaacacatctcaatattttctttgcaaaatcctcagaggaggagttggcaggagtagcaacttggccatgggacaaggaggccctgatgcacttaggtggcattgtcttgaacccatctttctatggcatgcctgggcacacccacaccatgatccatgagattggtcacagcctgggcctctatcacgtcttccgaggcatctcagaaatccagtcctgcagtgacccctgcatggagacagagccctccttcgagactggagacctctgcaatgataccaacccagcccctaaacacaagtcctgtggtgacccagggccaggaaatgacacctgtggctttcatagcttcttcaacactccttacaacaacttcatgagctatgcagatgacgactgtacggactccttcacgcccaatcaagtcgccagaatgcactgttacctggacctggtctaccagggctggcagccctccaggaaaccagcgcctgttgccctcgccccccaagttctgggccacacaacggactctgtgacactggagtggttcccacctatagatggccatttctttgaaagagaattgggatcagcatgtcatctttgcctggaagggagaatcctggtgcagtatgcttccaacgcttcctccccaatgccctgcagcccatcaggacactggagccctcgtgaagcagaaggtcatcctgatgttgaacagccctgtaagtccagtgtccgcacctggagcccaaattcagctgtcaacccacacacggttcctccagcctgccctgagcctcaaggctgctacctcgagctggagttcctctaccccttggtccctgagtctctgaccatttgggtgacctttgtctccactgactgggactctagtggagctgtcaatgacatcaaactgttggctgtcagtgggaagaacatctccctgggtcctcagaatgtcttctgtgatgtcccactgaccatcagactctgggacgtgggcgaggaggtgtatggcatccaaatctacacgctggatgagcacctggagatcgatgctgccatgttgacctccactgcagacaccccactctgtctacagtgtaagcccctgaagtataaggtggtccgggaccctcctctccagatggatgtggcctccatcctacatctcaataggaaattcgtagacatggatctaaatcttggcagtgtgtaccagtattgggtcataactatttcaggaactgaagagagtgagccatcacctgctgtcacatacatccatggaagtgggtactgtggcgatggcattatacaaaaagaccaaggtgaacaatgcgacgacatgaataagatcaatggtgatggctgctcccttttctgccgacaagaagtctccttcaattgtattgatgaacccagccggtgctatttccatgatggtgatggggtatgtgaggagtttgaacaaaaaaccagcattaaggactgtggtgtctacacgccccagggattcctggatcagtgggcatccaatgcttcagtatctcatcaagaccagcaatgcccaggctgggtcatcatcggacagccagcagcatcccaggtgtgtcgaaccaaggtgatagatctcagtgaaggcatttcccagcatgcctggtacccttgcaccatcagctacccatattcccagctggctcagaccactttttggctccgggcgtatttttctcaaccaatggttgccgcagctgtcattgtccacctggtgacggatgggacatattatggggaccaaaagcaggagaccatcagcgtgcagctgcttgataccaaagatcagagccacgatctaggcctccatgtcctgagctgcaggaacaatcccctgattatccctgtggtccatgacctcagccagcccttctaccacagccaggcggtacgtgtgagcttcagttcgcccctggtcgccatctcgggggtggccctccgttccttcgacaactttgaccccgtcaccctgagcagctgccagagaggggagacctacagccctgccgagcagagctgcgtgcacttcgcatgtgagaaaactgactgtccagagctggctgtggagaatgcttatctcaattgctccagcagcgaccgctaccacggtgcccagtgtactgtgagctgccggacaggctacgtgctccagatacggcgggatgatgagctgatcaagagccagacgggacccagcgtcacagtgacctgtacagagggcaagtggaataagcaggtggcctgtgagccagtcgactgcagcatcccagatcaccatcaagtctatgctgcctccttctcctgccctgagggcaccacctttggcagtcaatgttccttccagtgccgtcaccctgcacaattgaaaggcaacaacagcctcctgacctgcatggaggatgggctgtggtccttcccagaggccctgtgtgagctcatgtgcctcgctccaccccctgtgcccaatgcagacctccagaccgcccggtgccgagagaataagcacaaggtgggctccttctgcaaatacaaatgcaagcctggataccatgtgcctggatcctctcggaagtcaaagaaacgggccttcaagactcagtgtacccaggatggcagctggcaggagggagcttgtgttcctgtgacctgtgacccacctccaccaaaattccatgggctctaccagtgtactaatggcttccagttcaacagtgagtgtaggatcaagtgtgaagacagtgatgcctcccagggacttgggagcaatgtcattcattgccggaaagatggcacctggaacggctccttccatgtctgccaggagatgcaaggccagtgctcggttccaaacgagctcaacagcaacctcaaactgcagtgccctgatggctatgccatagggtcggagtgtgccacctcgtgcctggaccacaacagcgagtccatcatcctgccaatgaacgtgaccgtgcgtgacatcccccactggctgaaccccacacgggtagagagagttgtctgcactgctggtctcaagtggtatcctcaccctgctctgattcactgtgtcaaaggctgtgagcccttcatgggagacaattattgtgatgccatcaacaaccgagccttttgcaactatgacggtggggattgctgcacctccacagtgaagaccaaaaaggtcaccccattccctatgtcctgtgacctacaaggtgactgtgcttgtcgggacccccaggcccaagaacacagccggaaagacctccagggatacagccatggc

SEQ ID NO: 4135 - DNA, 315 bp, Homo Sapiens
tcactttcaatgagaaatgatgcagtcaatgaaatagttgctgtgaaaaacaattttcctgtgatagaaattgttcagtgtaggatgtgccacctccagttcccaggagaaaagtgctccagaggaagaggaatatgcacagcaacaacagaagaggcctgcatggttggaaggatgttcaaaagggatggtaatccctggttaaccttcatgggctgcctaaagaactgtgctgatgtgaaaggcataaggtggagtgtctatttggtgaacttcaggtgctgcaggagccatgacctgtgcaatgaagacctt

SEQ ID NO: 4136 - DNA, 261 bp, Homo Sapiens
actgaaataatgtgttatgaatgtaaaaaatatcatcttgggttatgctatggtgtcatgacatcctgctccctgaagcataaacagtcctgtgcagttgagaacttttacatccttacaaggaaagggcagagcatgtatcattattcaaaactgtcgtgtatgaccagctgtgaggacatcaacttcctggggttcacgaagagggtagagctcatctgttgtgatcatagtaactactgcaacctccctgagggagtt

SEQ ID NO: 4137 - DNA, 234 bp, Homo Sapiens
ctacaatgtataacttgtcaccttaggaccagaacggaccgttgtaggaggggctttggagtatgtacagcccagaaaggcgaggcctgcatgctgttaagaatatatcaacgtaacacattgcaaatatcctacatggtttgtcagaagttctgccgtgacatgactttcgaccttcgtaaccgtacttacgttcatacgtgctgtaactataactactgcaattttaagctg

SEQ ID NO: 4138 - DNA, 228 bp, Homo Sapiens
ttgaaatgtaatacgtgtatttacacagaagggtggaagtgcatggcaggcagaggcacatgtatagccaaagaaaatgaactatgcagcacaaccgcctactttcgtggtgataagcacatgtatagcacgcatatgtgcaaatacaagtgcagagaagaggagagttccaaacgtggattgcttcgtgtcactctatgctgcgacaggaatttttgtaacgtattc

SEQ ID NO: 4139 - DNA, 2091 bp, Homo Sapiens
cagcttcactacacggtacaggaggagcaggaacatggcactttcgtggggaatatcgctgaagatctgggtctggacattacaaaactttcggctcgcgggtttcagacggtgcccaactcaaggaccccttacttagacctcaacctggagacaggggtgctgtacgtgaacgagaaaatagaccgcgaacaaatctgcaaacagagcccctcctgtgtcctgcacctggaggtctttctggagaaccccctggagctgttccaggtggagatcgaggtgctggacattaatgacaaccccccctctttcccggagccagacctgacggtggaaatctctgagagcgccacgccaggcactcgcttccccttggagagcgcattcgacccagacgtgggcaccaactccttgcgcgactacgagatcacccccaacagctacttctccctggacgtgcagacccagggggatggcaaccgattcgctgagctggtgctggagaagccactggaccgagagcagcaagcggtgcaccgctacgtgctgaccgcggtggacggaggaggtgggggaggagtaggagaaggagggggaggtggcgggggagcaggcctgcccccccagcagcagcgcaccggcacggccctactcaccatccgagtgctggactccaatgacaatgtgcccgctttcgaccaacccgtctacactgtgtccctaccagagaactctcccccaggcactctcgtgatccagctcaacgccaccgacccggacgagggccagaacggtgaggtcgtgtactccttcagcagccacatttcgccccgggcgcgggagcttttcggactctcgccgcgcactggcagactggaggtaagcggcgagttggactatgaagagagcccagtgtaccaagtgtacgtgcaagccaaggacctgggccccaacgccgtgcctgcgcactgcaaggtgctagtgcgagtactggatgctaatgacaacgcgccagagatcagcttcagcaccgtgaaggaagcggtgagtgagggcgcggcgcccggcactgtggtggcccttttcagcgtgactgaccgcgactcagaggagaatgggcaggtgcagtgcgagctactgggagacgtgcctttccgccccaagtcttcctttaagaattactacaccatcgttaccgaagcccccctggaccgagaggcgggggactcctacaccctgactgtagtggctcgggaccggggcgagcctgcgctctccaccagtaagtcgatccaggtacaagtgtcggatgtgaacgacaacgcgccgcgtttcagccagccggtctacgacgtgtatgtgactgaaaacaacgtgcctggcgcctacatctacgcggtgagcgccaccgaccgggatgagggcgccaacgcccagcttgcctactctatcctcgagtgccagatccagggcatgagcgtcttcacctacgtttctatcaactctgagaacggctacttgtacgccctgcgctccttcgactatgagcagctgaaggacttcagttttcaggtggaagcccgggacgctggcagcccccaggcgctggctggtaacgccactgtcaacatcctcatagtggatcaaaatgacaacgcccctgccatcgtggcgcctctaccagggcgcaacgggactccagcgcgtgaggtgctgccccgctcggcggagccgggttacctgctcacccgcgtggccgccgtggacgcggacgacggcgagaacgcccggctcacttacagcatcgtgcgtggcaacgaaatgaacctctttcgcatggactggcgcaccggggagctgcgcacagcacgccgagtcccggccaagcgcgacccccagcggccttatgagctggtgatcgaggtgcgcgaccatgggcagccgcccctttcctccaccgccaccctggtggttcagctggtggatggcgccgtggagccccagggcgggggcgggagcggaggcggagggtcaggagagcaccagcgccccagtcgctctggcggcggggaaacctcgctagacctcacc

SEQ ID NO: 4140 - DNA, 2082 bp, Homo Sapiens
caggaggtgaccactctcacggtgaaataccaagtgtcagaggaagtgccatctggtacagtgatcgggaagctgtcccaggaactgggccgggaggagaggcggaggcaagctggggccgccttccaggtgttgcagctgcctcaggcgctccccattcaggtggactctgaggaaggcttgctcagcacaggcaggcggctggatcgagagcagctatgccgacagtgggatccctgcctggtttcctttgatgtgcttgccacaggggatttggctctgatccatgtggagatccaagtgctggacatcaatgaccaccagccacggtttcccaaaggcgagcaggagctggaaatctctgagagcgcctctctgcgaacccggatccccctggacagagctcttgacccagacacaggccctaacaccctgcacacctacactctgtctcccagtgagcactttgccttggatgtcattgtgggccctgatgagaccaaacatgcagaactcatagtggtgaaggagctggacagggaaatccattcattttttgatctggtgttaactgcctatgacaatgggaacccccccaagtcaggtaccagcttggtcaaggtcaacgtcttggactccaatgacaatagccctgcgtttgctgagagttcactggcactggaaatccaagaagatgctgcacctggtacgcttctcataaaactgaccgccacagaccctgaccaaggccccaatggggaggtggagttcttcctcagtaagcacatgcctccagaggtgctggacaccttcagtattgatgccaagacaggccaggtcattctgcgtcgacctctagactatgaaaagaaccctgcctacgaggtggatgttcaggcaagggacctgggtcccaatcctatcccagcccattgcaaagttctcatcaaggttctggatgtcaatgacaacatcccaagcatccacgtcacatgggcctcccagccatcactggtgtcagaagctcttcccaaggacagttttattgctcttgtcatggcagatgacttggattcaggaaacaatggtttggtccactgctggctgagccaagagctgggccacttcaggctgaaaagaactaatggcaacacatacatgttgctaaccaatgccacactggacagagagcagtggcccaaatataccctcactctgttagcccaagaccaaggactccagcccttatcagccaagaaacagctcagcattcagatcagtgacatcaacgacaatgcacctgtgtttgagaaaagcaggtatgaagtctccacgcgggaaaacaacttaccctctcttcacctcattaccatcaaggctcatgatgcagacttgggcattaatggaaaagtctcataccgcatccaggactccccagttgctcacttagtagctattgactccaacacaggagaggtcactgctcagaggtcactgaactatgaagagatggccggctttgagttccaggtgatcgcagaggacagcgggcaacccatgcttgcatccagtgtctctgtgtgggtcagcctcttggatgccaatgataatgccccagaggtggtccagcctgtgctcagcgatggaaaagccagcctctccgtgcttgtgaatgcctccacaggccacctgctggtgcccatcgagactcccaatggcttgggcccagcgggcactgacacacctccactggccactcacagctcccggccattccttttgacaaccattgtggcaagagatgcagactcgggggcaaatggagagcccctctacagcatccgcagtggaaatgaagcccacctcttcatcctcaaccctcatacggggcagctgttcgtcaatgtcaccaatgccagcagcctcattgggagtgagtgggagctggagatagtagtagaggaccagggaagcccccccttacagacccgagccctgttgagggtcatgtttgtcaccagtgtggaccacctgagggactcagcccgcaagcctggggctttgagcatgtcgatgctgacg

SEQ ID NO: 4141 - DNA, 2490 bp, Homo Sapiens
agttacagccgggccaccgagcttctgtacagcctaaacgagggactacccgcgggggtgctcatcggcagcctggccgaggacctgcggctgctgcccaggtctgcagggaggccggacccgcagtcgcagctgccagagcgcaccggtgctgagtggaacccccctctctccttcagcctggcctcccggggactgagtggccagtacgtgaccctagacaaccgctctggggagctgcacacttcagctcaggagatcgacagggaggccctgtgtgttgaagggggtggagggactgcgtggagcggcagcgtttccatctcctcctctccttctgactcttgtcttttgctgctggatgtgcttgtcctgcctcaggaatacttcaggtttgtgaaggtgaagatcgccatcagagacatcaatgacaacgccccgcagttccctgtttcccagatctcggtgtgggtcccggaaaatgcacctgtaaacacccgactggccatagagcatcctgctgtggacccagatgtaggcattaatggggtacagacctatcgcttactggactaccatggtatgttcaccctggacgtggaggagaatgagaatggggagcgcaccccctacctaattgtcatgggtgctttggacagggaaacccaggaccagtatgtgagcatcatcatagctgaggatggtgggtctccaccacttttgggcagtgccactctcaccattggcatcagtgacattaatgacaattgccctctcttcacagactcacaaatcaatgtcactgtgtatgggaatgctacagtgggcaccccaattgcagctgtccaggctgtggataaagacttggggaccaatgctcaaattacttattcttacagtcagaaagttccacaagcatctaaggatttatttcacctggatgaaaacactggagtcattaaacttttcagtaagattggaggaagtgttctggagtcccacaagctcaccatccttgctaatggaccaggctgcatccctgctgtaatcactgctcttgtgtccattattaaagttattttcagaccccctgaaattgtccctcgttacatagcaaacgagatagatggtgttgtttatctgaaagaactggaacccgttaacactcccattgcgtttttcaccataagagatccagaaggtaaatacaaggttaactgctacctggatggtgaagggccgtttaggttatcaccttacaaaccatacaataatgaatatttactagagaccacaaaacctatggactatgagctacagcagttctatgaagtagctgtggtggcttggaactctgagggatttcatgtcaaaagggtcattaaagtgcaacttttagatgacaatgataatgctccaattttccttcaacccttaatagaactaaccatcgaagagaacaactcacccaatgcctttttgactaagctgtatgctacagatgccgacagcgaggagagaggccaagtttcatattttctgggacctgatgctccatcatatttttccttagacagtgtcacaggaattctgacagtttctactcagctggaccgagaagagaaagaaaagtacagatacactgtcagagctgttgactgtgggaagccacccagagaatcagtagccactgtggccctcacagtgttggataaaaatgacaacagtcctcggtttatcaacaaggacttcagcttttttgtgcctgaaaactttccaggctatggtgagattggagtaattagtgtaacagatgctgacgctggacgaaatggatgggtcgccctctctgtggtgaaccagagtgatatttttgtcatagatacaggaaagggtatgctgagggctaaagtctctttggacagagagcagcaaagctcctatactttgtgggttgaagctgttgatgggggtgagcctgccctctcctctacagcaaaaatcacaattctccttctagatatcaatgacaaccctcctcttgttttgtttcctcagtctaatatgtcttatctgttagtactgccttctactctgccaggctccccggttacagaagtctatgctgtcgacaaagacacaggcatgaatgctgtcatagcttacagcatcatagggagaagaggtcctaggcctgagtccttcaggattgaccctaaaactggcaacattactttggaagaggcattgctgcagacagattatgggctccatcgcttactggtgaaagtgagtgatcatggttatcccgagcctctccactccacagtcatggtgaacctatttgtcaatgacactgtcagtaatgagagttacattgagagtcttttaagaaaagaaccagagattaatatagaggagaaagaaccacaaatctcaatagaaccgactcataggaaggtagaatctgtgtcttgtatgcccacctta

SEQ ID NO: 4142 - DNA, 2373 bp, Homo Sapiens
caagaacttatttacactattagagaggaattgcctgaaaatgtgcccataggaaacataccaaaggatctgaacatttctcacatcaatgctgccacagggaccagcgccagccttgtctacagactggtttctaaagctggggatgcccctttggtgaaagtatccagcagcactggggaaattttcacaacctccaacagaatagacagagaaaaactctgtgctggcgcctcatatgctgaggagaatgagtgtttctttgaacttgaggtggtgatcctccccaatgatttcttcaggctgatcaaaataaaaataattgtcaaggataccaatgataatgcccccatgtttccatctcctgtcatcaatatttccattccagaaaacactttgatcaacagccgctttccaattccatcagcaacagatcctgacacaggcttcaatggtgtacagcattatgaattgttaaatgggcagagtgtttttggactggatatcgtggaaactccagagggagagaagtggccacaactgattgttcagcaaaacttggatagagaacagaaagatacctatgtgatgaaaatcaaagtagaggatggaggcactccacagaaatccagtacggccatactgcaggtcacagtaagtgatgtaaatgacaacaggccagtgtttaaagagggtcaagtggaggtgcatattccagagaatgctcccgtaggtacctctgtaattcagctccatgccactgatgcagatataggcagtaatgctgaaatccggtacatttttggtgcccaggtcgcccctgcaaccaaaagactctttgctttaaataatactactgggctgattacagttcagaggtccttagatagagaggagacagccattcacaaagtgacagtgctggctagtgacggcagctccactcctgctcgagcaacggttaccatcaatgtcaccgatgtaaatgataaccctcctaatatagacctcaggtacattataagtcccatcaatggcaccgtgtatttatctgagaaagatcctgtcaatacaaagattgccctaattacagtttcagataaggacacagatgtgaatggcaaagtgatctgttttattgaaagagaggtcccatttcatttgaaggcggtatatgacaaccaatatttgttagagacctcttctttgttggactatgagggcaccaaagaattcagctttaaaattgttgcctctgattctgggaagcccagtttaaatcagactgccctggtaagggttaagcttgaggatgaaaatgacaacccaccaattttcaaccagcctgtaattgagctgtcagtttctgaaaacaaccgacgtgggttatacttaacaactattagtgccacagatgaagacagtgggaaaaatgcagacattgtttatcagcttggacctaatgcctccttctttgatctggaccgaaaaacaggagttttgacagcctccagagtatttgacagagaagaacaagaacgattcatttttacagtaactgccagggataatgggacccctcccctccaaagccaagcggctgtgattgttactgttctggatgagaatgacaatagccccaagtttactcataatcattttcaattttttgtgtctgagaatctgccaaagtatagtactgtgggggtaatcacagtgacagatgcagatgctggagagaataaagctgtgactctttccattctaaatgacaatgataattttgtgttggatccctattctggagtcataaagtcaaatgtctcatttgatagagagcagcagagttcctacacttttgatgtcaaagccactgatggaggacaaccacctcgttcctctactgcaaaagtaactatcaacgtcatggatgtcaatgacaacagcccagttgtcatttctccaccgtctaatacttcctttaagttggtgcccctctcagccattcctggctccgtggtagcagaagtttttgcagtggatgttgacactggaatgaacgctgaactaaagtatactatagtgagtggaaacaataaaggcttattccggattgatccagtaacaggtaacattactctggaagaaaaaccagcacctactgatgtgggattgcatcgtttggtggtcaacataagtgacctggggtaccctaagtctttgcacacgcttgtgcttgtattcctttatgttaacgacactgctggaaatgcctcctatatctatgacttgatccgcaggactatggagaccccgttggacaggaacataggggatagtagccaaccctatcaaaatgaggactatctaacc

SEQ ID NO: 4143 - DNA, 2004 bp, Homo Sapiens
cagctccactactccgtcccggaggaagccgaacacggcaccttcgtgggccgcatcgcgcaggacctggggctggagctggcggagctggtgccgcgcctgttccagttggattccaaaggccgcggggaccttctggaggtaaatctgcagaatggcattttgtttgtgaattctcggatcgaccgcgaggagctgtgcgggcggagcgcggagtgcagcatccacctggaggtgatcgtagacaggccgctgcaggttttccatgtggacgtggaggtgaaggacattaacgacaaccctccagtgttcccagcgacacaaaagaatctgttcatcgcggaatccaggccgcttgactctcggtttccactagagggcgcgtccgatgcagatatcggggagaacgccctgctcacttacagactgagccccaatgagtatttcttcctggacgtgccaaccagcaaccagcaggtaaaacctcttggacttgtattacggaaacttttagacagagaagaaactccggagcttcatttattgctcacggccaccgatggaggcaaacccgagctgactggcaccgttcaattactcatcacggtactggacaacaatgacaatgccccagtgttcgacagaaccctgtatacggtgaaattaccagaaaacgtttctatcggaacgctggtgattcaccccaatgcctcagatttagacgaaggcttgaatggggatattatttactccttctccagtgatgtttctccagatataaaatccaagttccacatggaccccttaagtggggcaatcacagtgataggacatatggattttgaagaaagtagagcacacaagatcccagtcgaggctgtcgataaaggcttcccacccctggctggtcattgtacacttcttgtggaagttgtggatgtaaatgacaatgctccacagttgactatcaaaacgctctcggttcctgtaaaagaggacgcacaactggggacagttattgccctgattagtgtgatcgacctagacgcagatgccaacgggcaggttacctgctccctgacgccccacgtccccttcaagctggtgtccacctacaagaattactactcgttggtgctggacagagctctggaccgcgagagtgtgtccgcctacgagctggtggttaccgcgcgggacgggggctcgccttcactgtgggccacggccagggtgtctgtggaggtggccgacgtgaacgacaacgcaccagcgttcgcgcagtccgagtacacggtgttcgtgaaggagaacaacccgccgggctgccacatcttcacggtgtctgcgcgggacgctgacgcgcaggagaacgccctggtgtcctactcgctggtggagcggcggttgggcgagcgctcgctgtcgagctacgtgtcagtgcacgcggagagcggcaaggtgtacgcgctgcagccgttggaccacgaggagctggagctgctacagttccaggtgagcgcgcgcgacgcgggcgtgccgcctctgggcagcaacgtgacgctgcaggtgttcgtgctggacgagaacgacaatgcgccggcgctgctgacacctcggatgaggggcactgacggcgcagtgagcgagatggtgctgcggtcggtgggcgccggcgtagtggtggggaaggtgcgcgcagtggacgccgactcgggctacaacgcgtggctttcatacgagctgcagccagaaacggccagcgcgagcatcccgttccgcgtggggctgtacacgggcgagatcagcacaacgcgtgccctggacgaaacggacgcaccgcgccagcgcctactggtgctggtgaaagaccacggggagccagcgctgacggccacggccactgtgctggtgtcgctggtggagagcggccaggcgccaaagtcatcgtcgcgggcgtcagtgggtgccacgggccccgaggtgacgctggtggatgtcaac

SEQ ID NO: 4144 - DNA, 1989 bp, Homo Sapiens
acaactatccgctattcagtggcagaggaaatggagagcggctcgtttgtggccaacgtagctaaggacctaggactggaggtagggaagctggctgcgcgcggggcgcggctggtttccgagggcaacaaaatgcatttccggctccaccgcaagacgggagatttgtttgtgaaggagaaactggatcgggagtcactttgtggcaaagccgacccttgtgttctgcactttgaagtagtcctggtggagccgctgcagtccttccgggccgaggtcagggtatttgatatcaatgacaatgccccagttttcctaaacaaggagccgcttttaaagattccggagagcacccctttgggttcacgttttcctctgcagagcgcccaggatctggacgtgggccttaacggtctccagaactacaccctgagtgccaatgggtatttccacctgcacacccgcttctgcagccacgggcctaaatatgctgagctggtgctgaacaaacccctggaccgagaggagcagcctgaagtcaacttgacaattacggcggtggacggcgggtccccgcctaagtctggcacagctcacatccacgtggtggttctggatgtcaacgaccacgtgccccagttctcgcgactggtgtacagagcccaggtatcagagaacagccccaatggctctttggtggccacggtgactgccgtggacctagacgagggcaccaacaaagcgataacttactctttagctcaaaacccagaagcaattctcaagacgtttcagattgaccctcaaaatggagaagttcgactaagaggacccctcgattttgaagccattgaaacatacgacattgacattcaagctacagatggtggaggcctctctgcccacagcaaagtcctggtagaagtggtggatgtgaatgacaatcctcccgaagtgatggtctcctctgtgtccagcccactccctgaagactcaccaccacagacagtagtagcccttttcactatcagagaccgggacattcgagtgggaggaaaagtcacctgcttcctcagagaagaccttccctttgtaatcaaacctacatttgggaattcttactcactggtcactgacagaagcttggatcgggaggaggtctcaggctataatatcaccattgttgccatggatactggaccacctagcttgtctgccgagactatgatagaggtgctaatatccgacgttaatgacaatcctccaatatttcgggaagattcctatatcttgactgttcgagaaaacaacagtcctgcggtttttattggcaaagtccatgctgaggatcttgatttgggtgagaatgcccaaataacatattctctgttgcctccaaaaaacggagatctttcagtctttgcttacatatccataaattcaggcaatgggaagctctacgcgctgagaaccatggattatgaggccattcaagattttcaatttgtggtaaaggcaactgatgggggcttcctgtcactgagtagccaagttactgtcagagtggttgtcctagatgacaatgacaatcgtccaatgatcttatacccactgcagaacggcaccttgccctgcaatgacctggtgcccaggtctgcagaggcaggctacctagtgaccaaagtggtggctgtggatggtgactcaggtcagaattcttggctttcatatcatctacttaaggccactgaccttgggttattttctgttcaaagacaaaatggagaaatccatacattaaggcagatatctgagagagaccccatgatgcagaaattgatcattcttgttcaggatcacggccaaccagctctttccactactgtctcactcaacatcctgctggtagatggcttttcagagccctacctgcagttccaggatccaaccaagcattctagaaaggtaaatccatccactaaatatttg

SEQ ID NO: 4145 - DNA, 1992 bp, Homo Sapiens
ggctctgaaacctggagcttttctgtggcagaagaaatgcagagcgggagttttgtaggcaatctggcaaaggacctggggctgaaggtgagagaactgtcctcacggggggctcgggtggtctctaatgataagaaacagcgtttgcagctggacataaacactggggatttgctcttaagtgaaacactagacagggaggagctctgcggttccatcgagccttgcgtgctacatttgcaggtgttaatgcaaaaccccacgcagtttttacaaattgagcttcaggtcagggatataaatgatcactctcccatcttctcggaaaaacaaatgctcctagaaatcccagagaacagtcccgttggtgctgtgttcttactagaaagtgcgaaggatttagatgtaggaatcaatgctgtaaaaagctacacaataagccccaactctcattttcacattaaaatgagagtcattccagacaataggaaataccccgagttagttctggacaaggcgctggattatgaagagctcccggagctcagtttcatcctctctgctctggatggtgggtcccctcccaggtctggaactgccttggtcagggtggtggttgtggacattaatgacaactcccctgaatttgagcaggctttttatgaggtgaagattcgggagaatagcatccttggctcgctgattttgattgtctcagcttgggatttagactctggaacaaatggtgaaatatgctataccttttcccatgcctcagaagatattcgcaagacatttgaaattaatcaaaagtctggagaaattactttaagagcacctctggattttgaaacgattgagtcatactcaataatcattcaagccacagatgggggaggactttttggaaaatctacagtcataattcacgtgatagatgtaaatgacaatgctcctgaaatcactgtgtcatcaattaccagtccaatcccagaaaatacgccagagaccgtggttatggtttttagtatccaagatatagactctggggacaacggaagaattgtttgttccattccggaagacctcccattcgtgctaaaatcttcagttgagaattactacacgttggaaacagagagaccactggacagagagagcacagccgagtacaatatcaccatcaccgtcaccgacttggggatacccaggctgaaaaccgagcacaacacaactgtgttggtctctgacgtcaatgacaacgcccccaccttcacccaaacctcctacaccctgttcgtccgcgagaacaacagccccgccctgcacatcggcagtgtcagcgctacagacagagactcaggcaccaacgcccaggtcaactactcgctactcccgccccaggacctgcacctgcccctcgcctccctggtctccatcaacacagacaacggccacctgttcgccctcaggtcgctggactacgaggccctgcaggctttcgacttccgcgtgggcgccacagaccgcggctccccggctttgagcagcgaggcgctggtgcgcgtgctggtgctggacgccaacgacaactcgcccttcgtgctgtacccgctgcagaacggctccgcgccctgcaccgagctggtgccccgggcggccgagccgggctacctggtgaccaaggtggtggcggtggacggcgactcgggccagaacgcctggctgtcgtaccagctgctcaaggccacggagcccgggctattcggcgtgtgggcgcacaatggcgaggtgcgcaccgccaggctgctgagcgagcgcgacgcggccaagcacaggctggtggtgctggtcaaggacaatggcgagcctccgcgctcggccaccgccacgctgcaagtgctcctggtggacggcttctcccagccctacctgccgctccctgaggcggcaccggcccaggcccaggccgactcgctcaccgtctacttg

SEQ ID NO: 4146 - DNA, 1983 bp, Homo Sapiens
gaacctagaagctattctgtggtggaggaaactgagggcagctcctttgtcaccaatttagcaaaggacctgggtctggagcagagggaattctccaggcggggggttagggttgtttccagagggaacaaactacatttgcagctcaatcaggagaccgcggatttgttgctaaatgagaaattggaccgtgaggatctgtgcggtcacacagagccctgtgtgctacgtttccaagtgttgctagagagtcccttcgagttttttcaagctgagctgcaagtaatagacataaacgaccactctccagtatttctggacaaacaaatgttggtgaaagtatcagagagcagtcctcctgggactacgtttcctctgaagaatgccgaagacttagatgtaggccaaaacaatattgagaactatataatcagccccaactcctattttcgggtcctcacccgcaaacgcagtgatggcaggaaatacccagagctggtgctggacaaagcgctggaccgagaggaagaagctgagctcaggttaacactcacagcactggatggtggctctccgcccagatctggcactgctcaggtctacatcgaagtcctggatgtcaacgataatgcccctgaatttgagcagcctttctatagagtgcagatctctgaggacagtccggtaggcttcctggttgtgaaggtctctgccacggatgtagacacaggagtcaacggagagatttcctattcacttttccaagcttcagaagagattggcaaaacctttaagatcaatcccttgacaggagaaattgaactaaaaaaacaactcgatttcgaaaaacttcagtcctatgaagtcaatattgaggcaagagatgctggaaccttttctggaaaatgcaccgttctgattcaagtgatagatgtgaacgaccatgccccagaagttaccatgtctgcatttaccagcccaatacctgagaacgcgcctgaaactgtggttgcacttttcagtgtttcagatcttgattcaggagaaaatgggaaaattagttgctccattcaggaggatctacccttcctcctgaaatccgcggaaaacttttacaccctactaacggagagaccactagacagagaaagcagagcggaatacaacatcactatcactgtcactgacttggggacccctatgctgataacacagctcaatatgaccgtgctgatcgccgatgtcaatgacaacgctcccgccttcacccaaacctcctacaccctgttcgtccgcgagaacaacagccccgccctgcacatccgcagcgtcagcgctacagacagagactcaggcaccaacgcccaggtcacctactcgctgctgccgccccaggacccgcacctgcccctcacatccctggtctccatcaacgcggacaacggccacctgttcgccctcaggtctctggactacgaggccctgcaggggttccagttccgcgtgggcgcttcagaccacggctccccggcgctgagcagcgaggcgctggtgcgcgtggtggtgctggacgccaacgacaactcgcccttcgtgctgtacccgctgcagaacggctccgcgccctgcaccgagctggtgccccgggcggccgagccgggctacctggtgaccaaggtggtggcggtggacggcgactcgggccagaacgcctggctgtcgtaccagctgctcaaggccacggagctcggtctgttcggcgtgtgggcgcacaatggcgaggtgcgcaccgccaggctgctgagcgagcgcgacgcggccaagcacaggctggtggtgctggtcaaggacaatggcgagcctccgcgctcggccaccgccacgctgcacgtgctcctggtggacggcttctcccagccctacctgcctctcccggaggcggccccgacccaggcccaggccgacttgctcaccgtctacctg

SEQ ID NO: 4147 - DNA, 1992 bp, Homo Sapiens
ggctgggaaccccgtcgctattctgtgatggaggaaacagagagaggttcttttgtagccaacctggccaatgacctagggctgggagtgggggagctagccgagcggggagcccgggtagtttctgaggataacgaacaaggcttgcagcttgatctgcagaccgggcagttgatattaaatgagaagctggaccgggagaagctgtgtggccctactgagccctgtataatgcatttccaagtgttactgaaaaaacctttggaagtatttcgagctgaactactagtgacagacataaacgatcattctcctgagtttcctgaaagagaaatgaccctgaaaatcccagaaactagctcccttgggactgtgtttcctctgaaaaaagctcgggacttggacgtgggcagcaataatgttcaaaactacaatatttctcccaattctcatttccatgtttccactcgcacccgaggggatggcaggaaatacccagagctggtgctggacacagaactggatcgcgaggagcaggccgagctcagattaaccttgacagcggtggacggtggctctccaccccgatctggcaccgtccagatcctcatcttggtcttggacgccaatgacaatgccccggagtttgtgcaggcgctctacgaggtgcaggtcccagagaacagcccagtaggctccctagttgtcaaggtctctgctagggatttagacactgggacaaatggagagatatcatactccctttattacagctctcaggagatagacaaaccttttgagctaagcagcctttcaggagaaattcgactaattaaaaaactagattttgagacaatgtcttcgtatgatctagatatagaggcatctgatggcgggggactttctggaaaatgctctgtctctgttaaggtgctggatgttaacgataacttcccggaactaagtatttcatcacttaccagccctattcccgagaattctccagagacagaagtggccctgtttaggattagagaccgagactctggggaaaatggaaaaatgatttgctcaattcaggatgatgttccttttaagctaaaaccttctgttgagaatttctacaggctggtaacagaaggggcgctggacagagagaccagagccgagtacaacatcaccatcaccatcacagacttggggactccaaggctgaaaaccgagcagagcataaccgtgctggtgtcggacgtcaatgacaacgcccccgccttcacccaaacctcctacaccctgttcgtccgcgagaacaacagccccgccctgcacatcggcagtgtccgcgcaacagacagagactcgggcaccaacgcccaggtcacctactcgctgctgccgccccaggacccgcacctgcccctcacctccctggtctccattaacacggacaacggccacctgttcgctctccagtcgctggactacgaggccctgcaggctttcgagttccgcgtgggcgccacagaccgcggcttcccggcgctgagcagcgaggcgctggtgcgagtgctggtgctggacgccaacgacaactcgcccttcgtgctgtacccgctgcagaacggctccgcgccctgcaccgagctggtgccccgggcggccgagccgggctacctggtgaccaaggtggtggcggtggacggcgactcgggccagaacgcctggctgtcgtaccagctgctcaaggccacggagcccgggctgttcggcgtgtgggcgcacaatggcgaggtgcgcaccgccaggctgctgagcgagcgcgacgtggccaagcacaggctagtggtgctggtcaaggacaatggcgagcctccgcgctcggccaccgccacgctgcaagtgctcctggtggacggcttctctcagccctacctgccgctcccagaggcggccccggcccaagcccaggccgactcgcttaccgtctacctg

SEQ ID NO: 4148 - DNA, 1986 bp, Homo Sapiens
gagttggggtcctattccgtagtggaagaaacggagagaggctcttttgtggcaaatctaggaaaagacctggggttggggttgacagagatgtccacccgcaaggccaggatcatttcccaggggaacaaacagcatttgcagctcaaggctcaaactggggatttgctcataaatgagaagctagatcgagaggagctatgcggtcccactgagccttgcatactacatttccaagtgttaatggaaaaccctttagaaatatttcaggctgaactgagggtgatagatataaatgaccattctcccatgttcactgaaaaggaaatgattctaaaaataccggaaaacagtcctctaggaactgagttccctctgaatcatgctttggacttggacgtaggaagcaataatgttcaaaactataaaatcagcccaagctctcatttccgggttctaatccatgaattcagagatggcaggaaataccctgagctagtgttggataaagagctggatcgggaggaggagcctcaactaagattaaccctgacagcgctggatggtggctctccaccgcgatctggaactgctcaggtccgtattgaagtggtggacatcaatgataacgctcctgagtttgagcagcccatctacaaagtgcagattccagagaacagtcctcttggctccctggttgccaccgtctccgccagggatttagacggcggagccaatggaaaaatatcatacacactctttcagccttcggaggatattagtaaaactttggaggtaaatcctatgacaggggaagttcgactgagaaagcaagtagatttcgaaatggttacgtcttatgaagtgcgcatcaaagccacagatgggggaggtctttcaggaaagtgcactcttctcctgcaggtggtggacgtgaatgacaatcccccacaggtgaccatgtctgcactcaccagccccatcgcagagaactcgcctgagatagtagttgctgttttcagcgtttcagatcctgactccggaaacaatgggaagacgatttcctccatccaggaagaccttccctttcttctaaaaccttcagtcaagaacttttacaccttggtaacggagagagcactcgacagagaagcaagagctgaatataatatcaccctcaccgtcacagatatggggactccaaggctgaaaacggagcacaacataacagtgcagatatcagatgtcaatgataacgcccccactttcacccaaacctcctacaccctgttcgtccgcgagaacaacagccccgccctgcacatcggcagcgtcagcgccacagacagagactcgggcaccaacgcccaggtcacctactcgctgctgccgccccaagacccgcacctgcccctcgcctccctggtctccatcaacgcggacaacggccacctgttcgccctcaggtcgctggactacgaggccctgcaggctttcgagttccgcgtgggcgccacagaccgcggctcccccgcgctgagcagagaggcgctggtgcgcgtgctggtgctggacgccaacgacaactcgcccttagtgctgtacccgctgcagaacggctccgcgccctgcactgagctggtgccccgggcggccgagccgggctacctggtgaccaaggtggtggcggtggacggcgactcgggccagaatgcctggctgtcgtaccagctgctcaaggccacggagcccgggctgttcggtgtgtgggcgcacaatggcgaggtgcgcaccgccaggctgctgagcgagcgcgacgcagccaagcagaggctggtggtgctggtcaaggacaatggcgagcctccgcgctcggccaccgccacgctgcacgtgctcctggtggacggcttctcccagcccttcctgccgctcccagaggcggcccccggccagacccaggccaactcgctcactgtctacctg

SEQ ID NO: 4149 - DNA, 1992 bp, Homo Sapiens
gggtccgagtcaagacgctattctgtggctgaggaaaaagagaggggctttttaatagccaacctagcaaaggatctgggactaagggtagaggaactggccgcgaggggggcccaagttgtgtccaaagggaacaaacagcattttcagctcagtcatcagacaggtgatttgctcctgaatgagaaattggaccgggaggagctatgcggccccacagaaccatgcatactacattttcagatattactgcaaaaccctttgcagttcgttacaaacgagctccgtatcatagatgtaaatgaccattctccggtattctttgaaaatgaaatgcatctgaaaatcctagaaagcactctgccaggaacagtaattcctttgggaaatgctgaggacttggatgtgggaagaaacagcctccaaaactacactatcactccgaattcccacttccacgtactcactcgcagtcgtagggacggaaggaagtacccggaactagtactggataaagcgctcgatcgggaggagcagccggaactcagcttaacgctcaccgcgctggacggcggctctccccctcggtctgggacagcccagataaacatccaggtcttagatataaacgacaatgcaccagaatttgcacagccgctctatgaggttgcagttctagagaatacccccgttaactctgtcattgtcactgtctcggcttctgacttagatacaggaagttttgggacaatatcatatgcattttttcatgcttctgaagaaattcgcaaaacttttcagctaaatccaattactggtgatatgcaactggtcaaatatttgaattttgaagcgattaatagttatgaagtcgacatcgaggccaaggatggcggaggcctatccggaaagtctacagtcatagtccaggtggttgatgtcaacgacaacccaccggaactgaccttgtcttcagtaaacagccctattcctgagaactcgggagagactgtactggctgttttcagtgtttctgatctagactctggagacaacggaagagtgatgtgttccattgagaacaatctccccttcttcctgaaaccatctgtagagaatttttacaccctagtgtcagaaggcgcgctggacagagagaccagatccgagtacaacattaccatcactatcactgacctggggacacccaggctgaaaaccaagtacaacataaccgtgctggtctccgacgtcaatgacaacgcccccgccttcacccaaacctcctacaccctgttcgtccgcgagaacaacagccccgccctgcacatcggcagtgtcagcgccacagacagagactcaggcaccaacgcccaggtaacctactcgctgctgccgccccaggacccgcacctgcccctctcttccctggtctccatcaacgcggacaacggccacctgtttgccctcaggtcgctggactacgaggccctgcaggcgttcgagttccgcgtgggcgccgcagaccgcggctccccggctttgagcagcgaggcgctggtgcgcgtgctggtgctggacgccaacgacaactcgccctttgtgctgtacccgctgcagaacggctccgcgccctgcaccgagctggtgccccgggcggctgagccgggctacctggtgaccaaggtggtggcggtggacagcgactcgggccagaacgcctggctgtcgtaccagctgctcaaggccacggagcccgggctgttcggcgtgtgggcgcacaatggcgaggtgcgcaccgccaggctgctgagcgagcgcgacgcggccaagcacaggctggtggtgctggtcaaggacaatggcgagcctccgcgctcggccaccgccacgctgcatgtgctcctggtggacggcttctcccagccctacctgcctctcccggaggcggcaccggcccaggcccaggccgacttgctcaccgtctacctg

SEQ ID NO: 4150 - DNA, 1977 bp, Homo Sapiens
gttaggtattccataccagaagaaacagaaagtggctattctgtggccaacctggcaaaagacctgggtcttggggtgggggaactggccactcggggcgcgcgaatgcattacaaaggaaacaaagagctcttgcagcttgatataaagaccggcaatttgcttctatatgaaaaactagaccgggaggtgatgtgcggggcgacagaaccctgtatattgcatttccagctcttactagaaaatccagtgcagttttttcaaactgatctgcagctcacagatataaatgaccatgccccagagttcccagagaaggaaatgctcctaaaaatcccagagagcacccagccagggactgtgtttcccttaaaaatagcccaggactttgacataggtagcaacactgttcagaactacacaatcagcccaaattcacactttcatgttgctacgcataatcgcggagatggcagaaaatacccagagctggtgctggacaaagcgctggaccgggaggagcggcctgagctcagcttaacactcactgcactggacggtggggctccgcccaggtccgggaccaccacaattcgcattgtcgtcttggataataatgacaacgcccccgaatttttacaatcattctatgaggtacaggtgcccgagaacagcccccttaactccttagttgtcgttgtctccgctcgagatttagatgcaggagcatatgggagtgtagcctatgctctattccaaggcgatgaagttactcaaccatttgtaatagacgagaaaacagcagaaattcgcctgaaaagggcattggatttcgaggcaactccatattataacgtggaaattgtagccacagatggtgggggcctttcaggaaaatgcactgtggctatagaagtggtggatgtgaatgacaacgcccctgaactcaccatgtctacgctctccagccctaccccagaaaatgccccggaaactgtagttgccgttttcagtgtttctgatccagactccggggacaacggtaggatgatttgctccatccagaatgatctcccctttcttttgaagcccacattaaaaaacttttacaccctagtgacacagagaacactggacagagagagccaagccgagtacaacatcaccatcactgtcaccgacatggggacacccaggctgaaaaccgagcacaacataacggtcctggtctccgacgtcaatgacaacgcccccgccttcacccaaacctcctacaccctgttcgtccgagagaacaacagccccgccctgcacatcggcagtgtcagcgccacagacagagactcaggcaccaacgcccaggtcacctactcgctgctgccgccccagaatccacacctgcgcctcgcctccctggtctccatcaacgcggacaacggccacctgtttgccctcaggtcgctggactacgaggccctgcaggcgttcgagttccgcgtgggagccacagaccgcggctccccggcgctgagcagcgaggcgctggtgcgcgtgctggtgctggacgccaacgacaactcgcccttcgtgctgtatccgctgcagaacggctcggcgccttgcaccgagctggtgccccgggcggccgagccgggctacctggtgaccaaggtggtggcggtggacggtgactcgggccagaacgcctggctgtcgtaccagctgctcaaggccacggagcccgggctgttcagcatgtgggcgcacaatggcgaggtgcgcaccgccaggctgctgagcgagcgcgacgcggccaagcacaggctggtggtgctggtcaaggacaatggcgagcctccgcgctcggccaccgccacgctgcacgtgctcctggtggacggcttctcccagccctacctgccgctgccggaggcggccccggcccaggcccaggccgactcgctcactgtctacctg

SEQ ID NO: 4151 - DNA, 1983 bp, Homo Sapiens
gaatcgattcagtattccgtattggaggagacagaaagtggcacgtttgtggccaacttgacaaaggacctgggactgagggtgggggagctggcttcgcggggcgctcgggttgttttcaaagggaacagacaacatttgcagtttgatccacagacccatgatttactgctaaatgaaaaactggaccgggaggagctgtgtggctccactgagccgtgtgtgctacctttccaagtgttactggaaaaccccttgcagttttttcaggcttccttgcgagtcagagatataaatgaccacgccccggaattccctgccagagaaatgctcctgaaaatatcagaaattactatgccaggaaagatatttcctttgaaaatggcacacgatttagacaccggcagcaacggccttcagaggtacacaatcagctccaaccctcacttccacgttctcacccgcaatcgcagcgaaggcaggaagttcccggagctggtgctagacaaaccgttggaccgcgaggagcagccccaactcaggctaacgctgatcgcgctggatggcgggtctccgccccggtcagggacctccgagattcagatccaggttttggacatcaatgacaacgtccccgagtttgctcaggagctctatgaagcacaagtccctgagaacaaccccctcggctctctggttattaccgtctcagccagagatttagatgcaggatcgtttgggaaggtatcttacgccctgtttcaagtcgatgacgtcaaccaacccttcgaaataaacgcaatcacaggagaaattcggctgagaaaggctttggattttgaggaaattcagtcttatgacgtggatgttgaggctacagatggtggaggcctatcaggaaaatgctctttagtcgtcagggtcctggacgtgaatgacaatgcccctgaactcaccatgtcgttcttcatcagcctcatcccagaaaacttaccagagatcacagtggcagttttcagtgtttcagatgcagactctggacataaccaacaggttatttgttcaatagagaacaatctcccctttctactaagaccttccgtggagaatttctacaccctggtaacagaaggcgcgctggacagagagagcagagccgagtacaacatcactatcacggtcactgatttggggacaccaaggctgaaaacccagcagagcataactgtgcaggtctccgacgtcaatgacaacgtccccgccttcacccaaacctcctacaccctgttcgtccgcgagaacaacagccccgccctgcacatcggcagcgtcagcgccacagacagagactcaggcatcaacgcccaggtcacctactcgctgctgccgccccaggacccgcacctgcccctctcttccctggtctccatcaacgcggacaacggccacctgtttgccctcaggtcgctggactacgaggccctgcagtctttcgagttccgcgtgggcgccacagaccgcggctccccggcgttgagcagcgaggcgctggtgcgcttgctggtgctggacgccaacgacaactcgcccttcgtgttgtacccgctgcagaacggctccgcgccctgcaccgagctggtgccccgggcggccgagccgggctacctggtgaccaaggtggtggcggtggacggcgactcgggccagaacgcctggctgtcgtaccagctgctcaaggccacggagctcggtctgttcggcgtgtgggcgcacaatggcgaggtgcgcaccgccaggctgctgagcgagcgagacgcagccaagcacaggctggtggtgcttgtcaaggacaatggcgagcctccgcgctcggccaccgccacgctgcacgtgctcctggtggacggcttctcccagccctacctgcctctccctgaggcggccccggcccaagcccaggccgactctctcaccgtctacctg

SEQ ID NO: 4152 - DNA, 1986 bp, Homo Sapiens
ggcgccgaaccgcttcggtattttgtggcggaggaaaccgagagaggcacctttcttaccaacttggcaaaagacctagggttaggggtaggggaactgagagcccggggaactagaattgtttcagaccagaacatgcaaattttactgctcagttcgcttactggtgatctacttctaaatgagaaattggaccgagaggaactgtgtggccccagagagccctgtgtgctgcctttccagttgttattggaaaaaccttttcagattttccgtgctgaactatgggtcagagacatcaatgatcacgctccagtatttctagacagagagatttccttgaaaatattagaaagtaccactccaggggcggcatttctcctagagagtgcacaggattcagatgttggaaccaacagcctgagtaactacaccatcagccccaatgcctatttccatattaatgtccatgatagcggggaggggaatatctatcccgaattggtgctgaatcaagtgctggatcgggaagagataccagagttcagtttaaccctcaccgctttagacggcggctctcctccaagatcagggaccgccctcgtgcgcattctggttctagacgtaaatgacaacgcccctgattttgtgcggtcgctctacaaggtgcaggtgcccgaaaatagccccgttggttccatggttgtctccgtgtcagccagagatttagataccggaagtaatggggaaatagcctatgcattttcttacgccactgaaagaattctcaaaacgtttcaaatcaatccaacatctggcagtcttcatcttaaagcgcaattggactatgaggcaattcaaacttacacattaactattcaggccaaagacggcggcgggctttctggaaaatgcactgtagtggttgatgtaacagatataaacgataatcgacccgagctgctcctgtcttcacttactagcccaattgcagaaaactcacccgagacagtcgtggctgtttttaggattagagacagagattccgggaacaatggaaagacagtgtgctccatccaggacgatctccccttcatcctgaagccatctgtcgaaaacttctatactctggtaacagagaaacctttggatcgagagaggaacactgagtacaacatcaccatcaccgtcaccgacttggggacacccaggctgaaaaccgagcacaacataaccgtgctggtctccgacgtcaatgacaacgctcccgccttcacccaaacctcctacaccctgtttgtccgtgagaacaacagccccgccctgcccatcggcagtgtcagcgccacagacagagactcaggcaccaacgcccaggtcatctactccctgctgccgtcccaggacccgcacctgcccctcgcctccctggtctccatcaacgcggacaacggccacctgtttgccctcaggtccctggactacgaggccctgcaggcgttcgagttccgggtgggcgccacagaccgcggctcccccgcgctgagcagcgaggcgctggtgcgcgtgctggtgctggacgccaacgacaactcgcccttcgtgctgtacccgctgcagaacagctccgcgccctgcaccgagccgttgccccgggcggccgagccgggctacctggtgaccaaggtggtggccgtggacggcgactcgggccagaacgcctggctgtcgtaccagctgctcaaggccacggagcccgggctattcggcgtgtgggcgcacaatggcgaggtgcgtaccgccaggctgctgagcgagcgcgacgcagccaagcagaggctggtggtgctggtcaaggacaatggcgagcctccgcgctcggccaccgccacgctgcacgtgctcctggtggacggcttctcccagccctacctgcggctcccggaggcggccccggaccaggccaactcgctcaccgtctacctg

SEQ ID NO: 4153 - DNA, 1992 bp, Homo Sapiens
ggttctgggtttggacgttattcggtgactgaggaaacagagaaaggatcctttgtggtcaatctggcaaaggatctgggactagcagagggggagctggctgcaaggggaaccagggtggtttccgatgataacaaacaatacctgctcctggattcacataccgggaatttgctcacaaatgagaaactggaccgagagaagctgtgtggccctaaagagccctgtatgctgtatttccaaattttaatggatgatccctttcagatttaccgggctgagctgagagtcagggatataaatgatcactcgccagtgtttcggcacaaagagatggtcttaaaaatatcagaaaatacagctgaagggacagcatttagactagaaagagcacaggatccagatgaaggtcataacagtatccaaaactacacgatcagctccaactcttttttccatattaaaattagtggcagtgatgaaggcatgatatatccagagctagtgttggacaaagcactggatcgggaggagcaggaagagctcagcttaaccctcacagcgctggatggtgggtctccatccaggtctgggacctccactatacgcattgtggtcttggatgtcaatgacaatgccccacagtttgcccaggctctgtatgagacccaggctccagaaaacagtccagtagggtcccttattgttaaagtgtctgcaggagatgcagactcaggagtcaatgcagaagtatcctattcattttttgatgcttctgaagatattttaacaacgtttcaaatcaatcctttttctggggaaatctttctcagagaattgcttgattatgagttagtaaattcttacaaaataaatatacaggcaatggacggcggaggcctttctgcaagatgtacagttttgataaaagtattagattccaatgacaatcctcctgaactgatcatatcatcactttccaactctgttgctgaaaactctcctgggatagtattggctgtttttaagattaaagacagagactccggagaaaatggaaagacaatttgctatgttcaagataatctgcctttttttctgaaaccgtctgttgacaatttttacatcctaatgactgaaggtgcactggacagagagagcaaagctgagtacaacatcaccatcaccgtcactgacttggggacacccaggctgaaaaccgagcacagcataaccctgcaggtctccgacgtcaatgacaacgcccccgccttcacccaaacctcctacaccctgttcgtccgggagaacaacagccccgccctgcacatcggcagtgtcagcgccacagacagagactcaggcaccaacgcccaggtcacctactcgctgctgccgccccaggacccacacctgcccctcgcctccctggtctccatcaacgcggacaatggccacctgtttgccctcaggtcgctggactacgaggccctgcaggctttcgacttccgcgtgggcgcctcagaccgcggctccccggctttgagcagcgaggcgctggtgcgcgtactggtgctggacgccaacgacaactcgcccttcgtgctgtacccgctgcagaacggctccgcgccctgcaccgagctggtgccccgggcggccgagccgggctacctggtgaccaaggtggtggcggtggacggcgactcgggccagaacgcctggctgtcgtaccagctgctcaaggccacggagcccgggctgttcggtgtgtgggcgcacaatggggaggtgcgcaccgccaggctgctgagcgagcgcgacgcagccaagcacaggctggtggtgcttgtcaaggacaatggcgagcctcctcgctcggccaccgccacgctgcacgtgctcctggtggacggcttctcccagccctacctgcctctcccggaggcggccccggcccaggcccaggccgacttgctcaccgtctacctg

SEQ ID NO: 4154 - DNA, 1992 bp, Homo Sapiens
gaacagattctctactcggtgtttgaggagcaggaagaaggctcagtggtgggcaacatcgccaaggacctggggttggcgccccgggagctggcggagcgcggagtccgcatcgtctccagaggtaggacgcagcttttcgccctgaacccgcgcagcggcaccttggtcaccgcgggtaggatagacagggaggagctctgcgacagatctccaaactgtgtgacaaacctggagattcttctagaagatacagtgaagattttgcgggtagaggtggaaataatcgatgttaatgataacccacccagttttgggacagaacagagggaaataaaagttgctgaaaatgaaaatcctggggcaagatttcctcttcctgaagcttttgatccggatgtaggtgtaaactccctgcagggttaccagctcaactcaaacggttacttttccctggacgtgcaaagtggggccgatgggattaagtacccagagctggtgctggaacgcgctctagatcgcgaggaagaggcggttcaccacctcgttctcacggccttcgatggaggtgacccggttcgctctggcactgccaggattctcataatacttgtggataccaacgataatgctcccgtgttcactcagcccgagtaccacgtaagtgttcgtgagaacgttcctgtaggcactcggctactcaccgtaaaagccactgatccagatgaaggagccaatggagacgtgacgtattctttccggaaagtaagagacaaaatatcacagctatttcagttgaattctctgagtggggatataacaatattggggggtctagattatgaggactctggattctatgacatagatgtagaagcccatgatgggcctggtctccgagctagaagcaaggtactggtgacagttctggatgaaaatgacaacgcaccagaagtcacagttacatctctcaccagctcagtccaggaatcttcttccccgggtacagtaattgcacttttcaacgtgcatgacagtgactcaggaggaaatggcctagtcacatgttctattccagataatctgccattcacacttgaaaagacctatggaaattattatcggttgttgacacacagaacactggacagggaagaagtctcagaatataacatcactgtaactgccactgaccagggaactcctccactgtctacagaaactcatatttcactgcaagtgatggacatcaatgacaacccacccactttccctcatgcttcctactctgcttacattcctgaaaacaaccccagaggagcctccatcttatctatgactgctcaagaccctgacagtggtgacaatgcccgaatcacttactccctggccgaagacaccttccagggtgcacctctgtcctcctatgtctccatcaactccaatacagggatcctatatgctctttgctccttcgactatgagcagtttagagacctgcagctgctgatgacagccagtgacagtggagaccctccactcagcagcaatgtgtcactgagcctctttgtgctggaccagaacgacaatgtccctgagatcctgtaccccaccttccctactgatggctccactggtgtggagctggcaccccgctccgcagattccggctacctggtgaccaaagtggtggcagtggacagagactcaggtcagaatgcctggctgtcctacagcctactcaagtccagcgagccgggactatttgcagtggggctgcacacaggcgaggtgcgcaccgcacgggccctgctggacagagacgcgctcaagcagaggcttgtagtggtcgtccaggaccatggccagccccctctctcggccaccgtcacactcactgtggctgtggccgacagcatcccagatgtcctggctgacttgggcagcctcaagccttcagcagacccagacgactcgggcctcacactctat

SEQ ID NO: 4155 - DNA, 1983 bp, Homo Sapiens
gaaccgatccgctacgctattcccgaggagctggacaggggctcgctggtagggaacctcgccaaggacctggggtttggcgtgggggatttacctactaggaacctgcgggttattgcagagaagaaattctttaccgtgagccccgaaaatgggaacttacttgtgagcgaccgtatagaccgagaggagatttgtggcaagaagtcgacgtgtgttctggaatttgaaatggttgctgaaaagcctttaaacttttttcatgtaactgtgctgatccaggatattaacgacaacccaccgacctttagccaaaatatcactgagctggaaatcagcgaactggctctcactggagccacatttgccctggaatctgcgcaagatcctgatgtaggtgtcaattcgctgcagcagtactacctcagccctgatccgcacttctctttgattcagaaggagaacctggatggcagtaggtacccagagctagtactgaaagcacccctggacagggaagagcagccacatcaccacctggtcctcacagctgtggatgggggcgagccctccagaagctgtaccacccagatcagggtaattgtcgcagatgcaaatgataaccccccagtatttactcaggacatgtacagggtcaatgttgcagagaacctgcccgctggctcctccgtattaaaagtgatggccattgacatggatgagggcatcaatgccgaaatcatctatgccttcatcaatattggcaaggaagtgagacaactgttcaagctggacagtaaaacgggggaactcaccactattggagaactggactttgaagagagagatagctacacaattggggtggaagcaaaggatggtggacatcacactgcatattgtaaagtacagatagatatttcagatgaaaatgacaatgccccggagataaccctggcttctgaatcccaacatatacaagaagatgctgagctggggactgccgttgccctgatcaaaacacatgatctagattctggatttaatggagaaatcctatgccaactaaaaggaaacttcccctttaaaatcgttcaagataccaaaaacacatacaggttggtgacagatggagccctggaccgggagcagatcccagaatacaatgtgacgatcacagctaccgacaaaggcaatccaccgctctcctccagcaagaccatcactctgcacatccttgatgtcaacgacaacgttcccgttttccaccaggcctcctacaccgtgcatgtagctgagaacaatccgcctggagcctccattgcgcatgtcagagcctcggatcccgacttgggacctaatggccttgtctcctactacatcgtggccagtgacctggagccgcgggagctgtcgtcctacgtgtccgtgagcgcgcggagcggggtggtgttcgcgcagcgagccttcgaccacgagcagctgcgtgccttcgagctcactctgcaggcccgcgaccagggctcgcctacgctcagcgccaacgtgagcctgcgcgtgttggtggacgaccgcaacgacaatgcaccgctggtgctgtacccagctctggggcccgaaggctctgcgctcttcgatatggtgccgcgctctgcagagcctggctacctggtgaccaaggtggtggcggtggacgcagactcgggatacaacgcctggctgtcctaccacattgtgcaggccagcgagcccgggctgttcagcctgggcctgcgcacgggtgaggtgcgcacggcgcgtaccttgggcgacagggaggccgcccgccagcgcctgctggtcactgtgcgtgatggaggacagcagcctctttcagccaccgtcatgctgcacctaatcttcgcagatagcttgcaagagatacaacctgaccttagcgaccgccccactccctctgaccctcaggcggagctacagtttcac

SEQ ID NO: 4156 - DNA, 1983 bp, Homo Sapiens
gagccgatccgctactcgattccggaggagctggccaagggctcggtggtggggaacctcgctaaggatctagggctcagtgtcctggatgtgtcggctcgcaagctgcgagtgagcgcggagaagctgcacttcagcgtagacgcggagagcggggacttacttgtgaagaaccgaatagaccgtgagcaaatatgcaaagagagaagaagatgtgagttgcaattggaagctgtggtggaaaatcctttaaatatttttcatgtcattgtggtgattgaggatgttaatgaccacgcccctcaatttgataaaaaggaaatacatttagaaattttcgaatctgcatccgctggtacacgactatcgcttgaccctgccacggatcctgatataaacataaactcaattaaagattataagataaactctaatccttatttttcattaatggttagagttaattccgatggtggcaaatacccagagttatctctggagaaactcctagaccgggaagaacagagatctcatagcttgatattgactgccttggacggaggggacccaccaagaagtgccaccgctcacatagaaatttctgtcaaggataccaatgataaccccccggttttcagcagagacgaatatagaattagtcttagtgaaaatctgccccctgggtcccctgtgttgcaagtgacagccactgaccaggatgagggggtcaatgctgagataaactactacttccgaagcactgcccagagcacaaaacatatgttctcattggatgagaaaacaggtatgattaagaataaccagtcatttgattttgaagatgtagaaaggtacaccatggaagtggaagcgaaggacggaggtggtctctctacccagtgtaaagtaatcatagaaatccttgatgaaaacgacaacagcccagaaataatcatcacttctctctctgatcagattttggagaattcacctccaggaatggttgttgccctcttcaaaacacgggatctggatttcggaggaaatggagaagtcaggtgtaatatagaaacagacattccattcaagatttattcttcttccaataactactacaaactggtgacagatggagccctggaccgagagcagacaccagaatacaatgtcaccatcgtagccactgacaggggcaagccgcctctttcttccagtagaagcatcaccttgtatgtcgctgacatcaacgacaacgccccagttttcgaccagacgtcctacgtggtccacgtggccgagaacaacccgccaggagcctccattgcgcaagtgagcgcctctgacccggatttggggctcaatggccacatctcctactctatagtggcgagtgacctagagcccctggcggtgtcgtcatacgtgtcagtgagcgcgcagagcggggtggtgttcgcgcagcgcgcctttgatcacgagcagctgcgcgccttcgcgctcacgctgcaggcccgcgaccacggctcgcccacgctcagcgccaacgtgagcctgcgcgtgttggtgggagaccgcaatgacaacgcaccgcgggtgctgtacccagctctgggtcctgacggctccgcgttcttcgatatggtacctcgctctgcagagcccggctacctagtgactaaggtggtagcggtggacgccgactcgggacacaacgcctggctgtcctaccacgtgctgcaggccagtgagcccggactcttcagcctggggctgcgcactggggaggtgcgcacggctcgagccttaggcgacagggacgcagcccgccagcgcctgctggtcgctgtgcgtgacggtggacagccgccactctctgccaccgccacgcttcatctggtcttcgcagacaacttgcaagagatactgccagacctcagcgaccgccctgtactctctgacccccaggctgaactgcagttttac

SEQ ID NO: 4157 - DNA, 1986 bp, Homo Sapiens
gtcattcactatgagatcccggaggaaagagagaagggtttcgctgtgggcaacgtggtcgcgaaccttggtttggatctcggtagcctctcagcccgcaggttccgggtggtgtctggagctagccgaagattctttgaggtgaaccgggagaccggagagatgtttgtgaacgaccgtctggatcgagaggagctgtgtgggacactgccctcttgcactgtaactctggagttggtagtggagaacccgctggagctgttcagcgtggaagtggtgatccaggacatcaacgacaacaatcctgctttccctacccaggaaatgaaattggagattagcgaggccgtggctccggggacgcgctttccgctcgagagcgcgcacgatcccgatgtgggaagcaactctttacaaacctatgagctgagccgaaatgaatactttgcgcttcgcgtgcagacgcgggaggacagcaccaagtacgcggagctggtgttggagcgcgccctggaccgagaacgggagcctagtctccagttagtgctgacggcgttggacggagggaccccagctctctccgccagcctgcctattcacatcaaggtgctggacgcgaatgacaatgcgcctgtcttcaaccagtccttgtaccgggcgcgcgtcctggaggatgcaccctccggcacgcgcgtggtacaagtccttgcaacggatctggatgaaggccccaacggtgaaattatttactccttcggcagccacaaccgcgccggcgtgcggcaactattcgccttagaccttgtaaccgggatgctgacaatcaagggtcggctggacttcgaggacaccaaactccatgagatttacatccaggccaaagacaagggcgccaatcccgaaggagcacattgcaaagtgttggtggaggttgtggatgtgaatgacaacgccccggagatcacagtcacctccgtgtacagcccagtacccgaggatgcccctctggggactgtcatcgctttgctcagtgtgactgacctggatgctggcgagaacgggctggtgacctgcgaagttccaccgggtctccctttcagccttacttcttccctcaagaattacttcactttgaaaaccagtgcagacctggatcgggagactgtgccagaatacaacctcagcatcaccgcccgagacgccggaaccccttccctctcagcccttacaatagtgcgtgttcaagtgtccgacatcaatgacaaccctccacaatcttctcaatcttcctacgacgtttacattgaagaaaacaacctccccggggctccaatactaaacctaagtgtctgggaccccgacgccccgcagaatgctcggctttctttctttctcttggagcaaggagctgaaaccgggctagtgggtcgctatttcacaataaatcgtgacaatggcatagtgtcatccttagtgcccctagactatgaggatcggcgggaatttgaattaacagctcatatcagcgatgggggcaccccggtcctagccaccaacatcagcgtgaacatatttgtcactgatcgcaatgacaatgccccccaggtcctatatcctcggccaggtgggagctcggtggagatgctgcctcgaggtacctcagctggccacctagtgtcacgggtggtaggctgggacgcggatgcagggcacaatgcctggctctcctacagtctcttgggatcccctaaccagagcctttttgccatagggctgcacactggtcaaatcagtactgcccgtccagtccaagacacagattcacccaggcagactctcacggtcttgatcaaagacaatggggagccttcgctctccaccactgctaccctcactgtgtcagtaaccgaggactctcctgaagcccgagccgagttcccctctggctctgccccccgggagcagaaaaaaaatctcaccttttat

SEQ ID NO: 4158 - DNA, 681 bp, Homo Sapiens
gcgcggccggtaaaggagccccgcggcctaagcgcagcgtctccgcccttggctgagactggcgctcctcgccgcttccggcggtcagtgccccgaggtgaggcggcgggggcggtgcaggagctggcgcgggcgctggcgcatctgctggaggccgaacgtcaggagcgggcgcgggccgaggcgcaggaggctgaggatcagcaggcgcgcgtcctggcgcagctgctgcgcgtctggggcgccccccgcaactctgatccggctctgggcctggacgacgaccccgacgcgcctgcagcgcagctcgctcgcgctctgctccgcgcccgccttgaccctgccgccctagcagcccagcttgtccccgcgcccgtccccgccgcggcgctccgaccccggcccccggtctacgacgacggccccgcgggcccggatgctgaggaggcaggcgacgagacacccgacgtggaccccgagctgttgaggtacttgctgggacggattcttgcgggaagcgcggactccgagggggtggcagccccgcgccgcctccgccgtgccgccgaccacgatgtgggctctgagctgccccctgagggcgtgctgggggcgctgctgcgtgtgaaacgcctagagaccccggcgccccaggtgcctgcacgccgcctcttgccaccc

SEQ ID NO: 4159 - DNA, 729 bp, Homo Sapiens
ggggcaggttggcagctgttttgcaggactgtgtggtcagcacactcggggcctacacggatggccacagccatcgcccgctgcgccccagatgaggagctgctgagctgctccagtttctccaggagtgggaagcggcggggcgagcgcatggaggcccaagggggcaagctggtctgccgggcccacaacgcttttgggggtgagggtgtctacgccattgccaggtgctgcctgctaccccaggccaactgcagcgtccacacagctccaccagctgaggccagcatggggacccgtgtccactgccaccaacagggccacgtcctcacaggctgcagctcccactgggaggtggaggaccttggcacccacaagccgcctgtgctgaggccacgaggtcagcccaaccagtgcgtgggccacagggaggccagcatccacgcttcctgctgccatgccccaggtctggaatgcaaagtcaaggagcatggaatcccggcccctcaggagcaggtgaccgtggcctgcgaggagggctggaccctgactggctgcagtgccctccctgggacctcccacgtcctgggggcctacgccgtagacaacacgtgtgtagtcaggagccgggacgtcagcactacaggcagcaccagcgaagaggccgtgacagccgttgccatctgctgccggagccggcacctggcgcaggcctcccaggagctccag

SEQ ID NO: 4160 - DNA, 450 bp, Homo Sapiens
ccaggatggttcttagactccccagacaggccctggaacccccccaccttctccccagccctgctcgtggtgaccgaaggggacaacgccaccttcacctgcagcttctccaacacatcggagagcttcgtgctaaactggtaccgcatgagccccagcaaccagacggacaagctggccgctttccccgaggaccgcagccagcccggccaggactgccgcttccgtgtcacacaactgcccaacgggcgtgacttccacatgagcgtggtcagggcccggcgcaatgacagcggcacctacctctgtggggccatctccctggcccccaaggcgcagatcaaagagagcctgcgggcagagctcagggtgacagagagaagggcagaagtgcccacagcccaccccagcccctcacccaggccagccggccagttccaaaccctggtg

SEQ ID NO: 4161 - DNA, 603 bp, Homo Sapiens
ttattcacagtgacagtccctaaggaactgtacataatagagcatggcagcaatgtgaccctggaatgcaactttgacactggaagtcatgtgaaccttggagcaataacagccagtttgcaaaaggtggaaaatgatacatccccacaccgtgaaagagccactttgctggaggagcagctgcccctagggaaggcctcgttccacatacctcaagtccaagtgagggacgaaggacagtaccaatgcataatcatctatggggtcgcctgggactacaagtacctgactctgaaagtcaaagcttcctacaggaaaataaacactcacatcctaaaggttccagaaacagatgaggtagagctcacctgccaggctacaggttatcctctggcagaagtatcctggccaaacgtcagcgttcctgccaacaccagccactccaggacccctgaaggcctctaccaggtcaccagtgttctgcgcctaaagccaccccctggcagaaacttcagctgtgtgttctggaatactcacgtgagggaacttactttggccagcattgaccttcaaagtcagatggaacccaggacccatccaact

SEQ ID NO: 4162 - DNA, 330 bp, Homo Sapiens
agcatcgaggaagctgtccccgctgtctgcaagaccaggacggtcatttacgagattcctcggagtcaggtcgaccccacgtccgccaacttcctgatctggcccccgtgcgtggaggtgaaacgctgcaccggctgctgcaacacgagcagtgtcaagtgccagccctcccgcgtccaccaccgcagcgtcaaggtggccaaggtggaatacgtcaggaagaagccaaaattaaaagaagtccaggtgaggttagaggagcatttggagtgcgcctgcgcgaccacaagcctgaatccggattatcgggaagaggacacggatgtgagg

SEQ ID NO: 4163 - DNA, 327 bp, Homo Sapiens
agcctgggttccctgaccattgctgagccggccatgatcgccgagtgcaagacgcgcaccgaggtgttcgagatctcccggcgcctcatagaccgcaccaacgccaacttcctggtgtggccgccctgtgtggaggtgcagcgctgctccggctgctgcaacaaccgcaacgtgcagtgccgccccacccaggtgcagctgcgacctgtccaggtgagaaagatcgagattgtgcggaagaagccaatctttaagaaggccacggtgacgctggaagaccacctggcatgcaagtgtgagacagtggcagctgcacggcctgtgacc

SEQ ID NO: 4164 - DNA, 969 bp, Homo Sapiens
gaatccaacctgagtagtaaattccagttttccagcaacaaggaacagaacggagtacaagatcctcagcatgagagaattattactgtgtctactaatggaagtattcacagcccaaggtttcctcatacttatccaagaaatacggtcttggtatggagattagtagcagtagaggaaaatgtatggatacaacttacgtttgatgaaagatttgggcttgaagacccagaagatgacatatgcaagtatgattttgtagaagttgaggaacccagtgatggaactatattagggcgctggtgtggttctggtactgtaccaggaaaacagatttctaaaggaaatcaaattaggataagatttgtatctgatgaatattttccttctgaaccagggttctgcatccactacaacattgtcatgccacaattcacagaagctgtgagtccttcagtgctacccccttcagctttgccactggacctgcttaataatgctataactgcctttagtaccttggaagaccttattcgatatcttgaaccagagagatggcagttggacttagaagatctatataggccaacttggcaacttcttggcaaggcttttgtttttggaagaaaatccagagtggtggatctgaaccttctaacagaggaggtaagattatacagctgcacacctcgtaacttctcagtgtccataagggaagaactaaagagaaccgataccattttctggccaggttgtctcctggttaaacgctgtggtgggaactgtgcctgttgtctccacaattgcaatgaatgtcaatgtgtcccaagcaaagttactaaaaaataccacgaggtccttcagttgagaccaaagaccggtgtcaggggattgcacaaatcactcaccgacgtggccctggagcaccatgaggagtgtgactgtgtgtgcagagggagcacaggagga

SEQ ID NO: 4165 - DNA, 363 bp, Homo Sapiens
tcataccatgaccggaagtcaaaagttgacctggataggctcaatgatgatgccaagcgttacagttgcactcccaggaattactcggtcaatataagagaagagctgaagttggccaatgtggtcttctttccacgttgcctcctcgtgcagcgctgtggaggaaattgtggctgtggaactgtcaactggaggtcctgcacatgcaattcagggaaaaccgtgaaaaagtatcatgaggtattacagtttgagcctggccacatcaagaggaggggtagagctaagaccatggctctagttgacatccagttggatcaccatgaacgatgtgattgtatctgcagctcaagaccacctcga

SEQ ID NO: 4166 - DNA, 1515 bp, Homo Sapiens
cagctttcattaccctctatccttccaaatgaaaatgaaaaggttgtgcagctgaattcatccttttctctgagatgctttggggagagtgaagtgagctggcagtaccccatgtctgaagaagagagctccgatgtggaaatcagaaatgaagaaaacaacagcggcctttttgtgacggtcttggaagtgagcagtgcctcggcggcccacacagggttgtacacttgctattacaaccacactcagacagaagagaatgagcttgaaggcaggcacatttacatctatgtgccagacccagatgtagcctttgtacctctaggaatgacggattatttagtcatcgtggaggatgatgattctgccattataccttgtcgcacaactgatcccgagactcctgtaaccttacacaacagtgagggggtggtacctgcctcctacgacagcagacagggctttaatgggaccttcactgtagggccctatatctgtgaggccaccgtcaaaggaaagaagttccagaccatcccatttaatgtttatgctttaaaagcaacatcagagctggatctagaaatggaagctcttaaaaccgtgtataagtcaggggaaacgattgtggtcacctgtgctgtttttaacaatgaggtggttgaccttcaatggacttaccctggagaagtgaaaggcaaaggcatcacaatgctggaagaaatcaaagtcccatccatcaaattggtgtacactttgacggtccccgaggccacggtgaaagacagtggagattacgaatgtgctgcccgccaggctaccagggaggtcaaagaaatgaagaaagtcactatttctgtccatgagaaaggtttcattgaaatcaaacccaccttcagccagttggaagctgtcaacctgcatgaagtcaaacattttgttgtagaggtgcgggcctacccacctcccaggatatcctggctgaaaaacaatctgactctgattgaaaatctcactgagatcaccactgatgtggaaaagattcaggaaataaggtatcgaagcaaattaaagctgatccgtgctaaggaagaagacagtggccattatactattgtagctcaaaatgaagatgctgtgaagagctatacttttgaactgttaactcaagttccttcatccattctggacttggtcgatgatcaccatggctcaactgggggacagacggtgaggtgcacagctgaaggcacgccgcttcctgatattgagtggatgatatgcaaagatattaagaaatgtaataatgaaacttcctggactattttggccaacaatgtctcaaacatcatcacggagatccactcccgagacaggagtaccgtggagggccgtgtgactttcgccaaagtggaggagaccatcgccgtgcgatgcctggctaagaatctccttggagctgagaaccgagagctgaagctggtggctcccaccctgcgttctgaactcacggtggct

SEQ ID NO: 4167 - DNA, 1500 bp, Homo Sapiens
ctggtcgtcacacccccggggccagagcttgtcctcaatgtctccagcaccttcgttctgacctgctcgggttcagctccggtggtgtgggaacggatgtcccaggagcccccacaggaaatggccaaggcccaggatggcaccttctccagcgtgctcacactgaccaacctcactgggctagacacgggagaatacttttgcacccacaatgactcccgtggactggagaccgatgagcggaaacggctctacatctttgtgccagatcccaccgtgggcttcctccctaatgatgccgaggaactattcatctttctcacggaaataactgagatcaccattccatgccgagtaacagacccacagctggtggtgacactgcacgagaagaaaggggacgttgcactgcctgtcccctatgatcaccaacgtggcttttttggtatctttgaggacagaagctacatctgcaaaaccaccattggggacagggaggtggattctgatgcctactatgtctacagactccaggtgtcatccatcaacgtctctgtgaacgcagtgcagactgtggtccgccagggtgagaacatcaccctcatgtgcattgtgatcgggaatgaggtggtcaacttcgagtggacatacccccgcaaagaaagtgggcggctggtggagccggtgactgacttcctcttggatatgccttaccacatccgctccatcctgcacatccccagtgccgagttagaagactcggggacctacacctgcaatgtgacggagagtgtgaatgaccatcaggatgaaaaggccatcaacatcaccgtggttgagagcggctacgtgcggctcctgggagaggtgggcacactacaatttgctgagctgcatcggagccggacactgcaggtagtgttcgaggcctacccaccgcccactgtcctgtggttcaaagacaaccgcaccctgggcgactccagcgctggcgaaatcgccctgtccacgcgcaacgtgtcggagacccggtatgtgtcagagctgacactggttcgcgtgaaggtggcagaggctggccactacaccatgcgggccttccatgaggatgctgaggtccagctctccttccagctacagatcaatgtccctgtccgagtgctggagctaagtgagagccaccctgacagtggggaacagacagtccgctgtcgtggccggggcatgccccagccgaacatcatctggtctgcctgcagagacctcaaaaggtgtccacgtgagctgccgcccacgctgctggggaacagttccgaagaggagagccagctggagactaacgtgacgtactgggaggaggagcaggagtttgaggtggtgagcacactgcgtctgcagcacgtggatcggccactgtcggtgcgctgcacgctgcgcaacgctgtgggccaggacacgcaggaggtcatcgtggtgccacactccttgccctttaaggtg

SEQ ID NO: 4168 - DNA, 1062 bp, Homo Sapiens
caacaccttcccaagaacaagcgtccaaaagaaccaggagagaatagaatcaaacctaccaacaagaaggtgaagcccaaaattcctaaaatgaaggacagggactcagccaattcagcaccaaagacgcagtctatcatgatgcaagtgctggataaaggtcgcttccagaaacccgccgctaccctgagtctgctggcggggcaaactgtagagcttcgatgtaaagggagtagaattgggtggagctaccctgcgtatctggacacctttaaggattctcgcctcagcgtcaagcagaatgagcgctacggccagttgactctggtcaactccacctcggcagacacaggtgaattcagctgctgggtgcagctctgcagcggctacatctgcaggaaggacgaggccaaaacgggctccacctacatcttttttacagagaaaggagaactctttgtaccttctcccagctacttcgatgttgtctacttgaacccggacagacaggctgtggttccttgtcgggtgaccgtgctgtcggccaaagtcacgctccacagggaattcccagccaaggagatcccagccaatggaacggacattgtttatgacatgaagcggggctttgtgtatctgcaacctcattccgagcaccagggtgtggtttactgcagggcggaggccgggggcagatctcagatctccgtcaagtaccagctgctctacgtggcggttcccagtggccctccctcaacaaccatcttggcttcttcaaacaaagtgaaaagtggggacgacatcagtgtgctctgcactgtcctgggggagcccgatgtggaggtggagttcacctggatcttcccagggcagaaggatgaaaggcctgtgacgatccaagacacttggaggttgatccacagaggactgggacacaccacgagaatctcccagagtgtcattacagtggaagacttcgagacgattgatgcaggatattacatttgcactgctcagaatcttcaaggacagaccacagtagctaccactgttgagttttcc

SEQ ID NO: 4169 - DNA, 1722 bp, Homo Sapiens
caagaaaactctttcacaatcaacagtgttgacatgaagagcctgccggactggacggtgcaaaatgggaagaacctgaccctgcagtgcttcgcggatgtcagcaccacctctcacgtcaagcctcagcaccagatgctgttctataaggatgacgtgctgttttacaacatctcctccatgaagagcacagagagttattttattcctgaagtccggatctatgactcagggacatataaatgtactgtgattgtgaacaacaaagagaaaaccactgcagagtaccaggtgttggtggaaggagtgcccagtcccagggtgacactggacaagaaagaggccatccaaggtgggatcgtgagggtcaactgttctgtcccagaggaaaaggccccaatacacttcacaattgaaaaacttgaactaaatgaaaaaatggtcaagctgaaaagagagaagaattctcgagaccagaattttgtgatactggaattccccgttgaggaacaggaccgcgttttatccttccgatgtcaagctaggatcatttctgggatccatatgcagacctcagaatctaccaagagtgaactggtcaccgtgacggaatccttctctacacccaagttccacatcagccccaccggaatgatcatggaaggagctcagctccacattaagtgcaccattcaagtgactcacctggcccaggagtttccagaaatcataattcagaaggacaaggcgattgtggcccacaacagacatggcaacaaggctgtgtactcagtcatggccatggtggagcacagtggcaactacacgtgcaaagtggagtccagccgcatatccaaggtcagcagcatcgtggtcaacataacagaactattttccaagcccgaactggaatcttccttcacacatctggaccaaggtgaaagactgaacctgtcctgctccatcccaggagcacctccagccaacttcaccatccagaaggaagatacgattgtgtcacagactcaagatttcaccaagatagcctcaaagtcggacagtgggacgtatatctgcactgcaggtattgacaaagtggtcaagaaaagcaacacagtccagatagtcgtatgtgaaatgctctcccagcccaggatttcttatgatgcccagtttgaggtcataaaaggacagaccatcgaagtccgttgcgaatcgatcagtggaactttgcctatttcttaccaacttttaaaaacaagtaaagttttggagaatagtaccaagaactcaaatgatcctgcggtattcaaagacaaccccactgaagacgtcgaataccagtgtgttgcagataattgccattcccacgccaaaatgttaagtgaggttctgagggtgaaggtgatagccccggtggatgaggtccagatttctatcctgtcaagtaaggtggtggagtctggagaggacattgtgctgcaatgtgctgtgaatgaaggatctggtcccatcacctataagttttacagagaaaaagagggcaaacccttctatcaaatgacctcaaatgccacccaggcattttggaccaagcagaaggctaacaaggaacaggagggagagtattactgcacagccttcaacagagccaaccacgcctccagtgtccccagaagcaaaatactgacagtcagagtcattcttgccccatggaagaaa

SEQ ID NO: 4170 - DNA, 210 bp, Homo Sapiens
gaagctgaagaagatggggacctgcagtgcctgtgtgtgaagaccacctcccaggtccgtcccaggcacatcaccagcctggaggtgatcaaggccggaccccactgccccactgcccaactgatagccacgctgaagaatggaaggaaaatttgcttggacctgcaagccccgctgtacaagaaaataattaagaaacttttggagagt

SEQ ID NO: 4171 - DNA, 456 bp, Homo Sapiens
ctgcctgctgtgcccccccagcagtgggccttgtctgctgggaacggctcgtcagaggtggaagtggtacccttccaggaagtgtggggccgcagctactgccgggcgctggagaggctggtggacgtcgtgtccgagtaccccagcgaggtggagcacatgttcagcccatcctgtgtctccctgctgcgctgcaccggctgctgcggcgatgagaatctgcactgtgtgccggtggagacggccaatgtcaccatgcagctcctaaagatccgttctggggaccggccctcctacgtggagctgacgttctctcagcacgttcgctgcgaatgccggcctctgcgggagaagatgaagccggaaaggaggagacccaagggcagggggaagaggaggagagagaagcagagacccacagactgccacctgtgcggcgatgctgttccccggagg

SEQ ID NO: 4172 - DNA, 525 bp, Homo Sapiens
caggagacagaagacccggcctgctgcagccccatagtgccccggaacgagtggaaggccctggcatcagagtgcgcccagcacctgagcctgcccttacgctatgtggtggtatcgcacacggcgggcagcagctgcaacacccccgcctcgtgccagcagcaggcccggaatgtgcagcactaccacatgaagacactgggctggtgcgacgtgggctacaacttcctgattggagaagacgggctcgtatacgagggccgtggctggaacttcacgggtgcccactcaggtcacttatggaaccccatgtccattggcatcagcttcatgggcaactacatggatcgggtgcccacaccccaggccatccgggcagcccagggtctactggcctgcggtgtggctcagggagccctgaggtccaactatgtgctcaaaggacaccgggatgtgcagcgtacactctctccaggcaaccagctctaccacctcatccagaattggccacactaccgctccccc

SEQ ID NO: 4173 - DNA, 1860 bp, Homo Sapiens
aagagtcccatatttggtcccgaggaggtgaatagtgtggaaggtaactcagtgtccatcacgtgctactacccacccacctctgtcaaccggcacacccggaagtactggtgccggcagggagctagaggtggctgcataaccctcatctcctcggagggctacgtctccagcaaatatgcaggcagggctaacctcaccaacttcccggagaacggcacatttgtggtgaacattgcccagctgagccaggatgactccgggcgctacaagtgtggcctgggcatcaatagccgaggcctgtcctttgatgtcagcctggaggtcagccagggtcctgggctcctaaatgacactaaagtctacacagtggacctgggcagaacggtgaccatcaactgccctttcaagactgagaatgctcaaaagaggaagtccttgtacaagcagataggcctgtaccctgtgctggtcatcgactccagtggttatgtaaatcccaactatacaggaagaatacgccttgatattcagggtactggccagttactgttcagcgttgtcatcaaccaactcaggctcagcgatgctgggcagtatctctgccaggctggggatgattccaatagtaataagaagaatgctgacctccaagtgctaaagcccgagcccgagctggtttatgaagacctgaggggctcagtgaccttccactgtgccctgggccctgaggtggcaaacgtggccaaatttctgtgccgacagagcagtggggaaaactgtgacgtggtcgtcaacaccctggggaagagggccccagcctttgagggcaggatcctgctcaacccccaggacaaggatggctcattcagtgtggtgatcacaggcctgaggaaggaggatgcagggcgctacctgtgtggagcccattcggatggtcagctgcaggaaggctcgcctatccaggcctggcaactcttcgtcaatgaggagtccacgattccccgcagccccactgtggtgaagggggtggcaggaggctctgtggccgtgctctgcccctacaaccgtaaggaaagcaaaagcatcaagtactggtgtctctgggaaggggcccagaatggccgctgccccctgctggtggacagcgaggggtgggttaaggcccagtacgagggccgcctctccctgctggaggagccaggcaacggcaccttcactgtcatcctcaaccagctcaccagccgggacgccggcttctactggtgtctgaccaacggcgatactctctggaggaccaccgtggagatcaagattatcgaaggagaaccaaacctcaaggtaccagggaatgtcacggctgtgctgggagagactctcaaggtcccctgtcactttccatgcaaattctcctcgtacgagaaatactggtgcaagtggaataacacgggctgccaggccctgcccagccaagacgaaggccccagcaaggccttcgtgaactgtgacgagaacagccggcttgtctccctgaccctgaacctggtgaccagggctgatgagggctggtactggtgtggagtgaagcagggccacttctatggagagactgcagccgtctatgtggcagttgaagagaggaaggcagcggggtcccgcgatgtcagcctagcgaaggcagacgctgctcctgatgagaaggtgctagactctggttttcgggagattgagaacaaagccattcaggatcccaggctttttgcagaggaaaaggcggtggcagatacaagagatcaagccgatgggagcagagcatctgtggattccggcagctctgaggaacaaggtggaagctccaga

SEQ ID NO: 4174 - DNA, 441 bp, Homo Sapiens
tcaggaggttgcttctgggataatgggcatttatatagagaggaccagacttcacctgcaccgggtctacgttgtttaaattggcttgacgcgcaaagcgggctggcatccgcgccggtaagcggtgccgggaatcatagttactgcaggaatccagatgaggaccctcgtggaccttggtgttatgtatcaggagaagcaggtgtgccagaaaaaaggccctgcgaggatctaagatgtcccgaaacgacatcccaggcgctgcctgccttcactaccgaaatacaggaagcaagtgaagggcctggtgcagatgaagtacaagtcttcgcgcctgctaatgccctgccagcacgttccgaagcagcggcagtacagcccgtgattggcataagccagagagttaggatgaatagcaaagaaaaaaaggaccttggtacg

SEQ ID NO: 4175 - DNA, 678 bp, Homo Sapiens
atgggtcggcccctgctgctgcccctactgcccctgctgctgccgccagcatttctgcagcctagtggctccacaggatctggtccaagctacctttatggggtcactcaaccaaaacacctctcagcctccatgggtggctctgtggaaatccccttctccttctattacccctgggagttagccacagctcccgacgtgagaatatcctggagacggggccacttccacgggcagtccttctacagcacaaggccgccttccattcacaaggattatgtgaaccggctctttctgaactggacagagggtcagaagagcggcttcctcaggatctccaacctgcagaagcaggaccagtctgtgtatttctgccgagttgagctggacacacggagctcagggaggcagcagtggcagtccatcgaggggaccaaactctccatcacccagggtcagcagcggactaaagccacaaccccagccagggaacccttccaaaacacagaggagccatatgagaatatcaggaatgaaggacaaaatacagatcccaagctaaatcccaagctccacctcacccagagcacctcccagccaccgtcccctcaagagcccccagaacgagaccctgtactctgtcttaaaggcctaaccaatggacagccctctcaagac

SEQ ID NO: 4176 - DNA, 516 bp, Homo Sapiens
cagcctggtggctccacaggatctggtccaagctacctttatggggtcactcaaccaaaacacctctcagcctccatgggtggctctgtggaaatccccttctccttctattacccctgggagttagccatagttcccaacgtgagaatatcctggagacggggccacttccacgggcagtccttctacagcacaaggccgccttccattcacaaggattatgtgaaccggctctttctgaactggacagagggtcaggagagcggcttcctcaggatctcaaacctgcggaaggaggaccagtctgtgtatttctgccgagtcgagctggacacccggagatcagggaggcagcagttgcagtccatcaaggggaccaaactcaccatcacccaggctgtcacaaccaccaccacctggaggcccagcagcacaaccaccatagccggcctcagggtcacagaaagcaaagggcactcagaatcatggcacctaagtctggacactgccatcagg

SEQ ID NO: 4177 - DNA, 534 bp, Homo Sapiens
ttacactgtgaaatatgtacagcggctggaagtagatgtcatggtcaaatgaagacatgcagttccgacaaagatacttgcgttcttctagtgggcaaagcaacttccaagggcaaggaattagtccacacctataaaggatgtataaggagtcaggattgttatagcggggtcatttcaactacaatgggccccaaagaccacatggtaacctcatctttttgttgtcagtcagacggttgcaactccgctttcctgtccgttccgttgaccaatctaaccgagaacggactgatgtgtccagcctgtacggcgtccttccgtgacaaatgcatgggaccaatgacacactgcaccggcaaggagaaccactgcgtcagcctatcaggacacgttcaagccgggattttcaagcctaggttcgccatgaggggatgtgctacagagtcaatgtgctttacaaagcccggggctgaagtacccaccggaacaaacgtgctattcttacaccacattgaatgtacgcactcacca

SEQ ID NO: 4178 - DNA, 354 bp, Homo Sapiens
caggacaacactcggaagatcataataaagaattttgacattcccaagtcagtacgtccaaatgacgaagtcactgcagtgcttgcagttcaaacagaattgaaagaatgcatggtggttaaaacttacctcattagcagcatccctctacaaggtgcatttaactataagtatactgcctgcctatgtgacgacaatccaaaaaccttctactgggacttttacaccaacagaactgtgcaaattgcagccgtcgttgatgttattcgggaattaggcatctgccctgatgatgctgctgtaatccccatcaaaaacaaccggttttatactattgaaatcctaaaggtagaa

SEQ ID NO: 4179 - DNA, 1068 bp, Homo Sapiens
gtgtccggcgcgcagtacatgggctcaggctacaccaaggccgtgtaccgggtccgcctgcccggcggtgccgcggtggcgctcaaggcggtggactttagcggccacgatctgggcagctgcgtgcgcgagttcggggtacggaggggctgctatcggctggcggcccacaagctgcttaaggagatggtgctgctggagcggctgcggcaccccaacgtgctgcagctctatggctactgctaccaggacagcgaggacatcccagacaccctgaccaccatcacggagctgggcgcccctgtagaaatgatccagctgctgcaaacttcctgggaggatcgattccgaatctgcctgagcctgggccgcctcctccaccacctggcccactccccactgggctccgtcactctgctggacttccgccctcggcagtttgtgctggtggatggggagctcaaagtgacggacctggatgacgcacgtgtggaggagacgccgtgtgcaggcagcaccgactgcatactcgagtttccggccaggaacttcaccctgccctgctcagcccagggctggtgcgagggcatgaacgagaagcggaacctctataatgcctacaggtttttcttcacatacctcctgcctcacagtgccccgccttcactgcgtcctctgctggacagcatcgtcaacgccacaggagagctcgcctggggggtggacgagaccctggcccagctggagaaggtgctgcacctgtaccggagcgggcagtatctgcagaactccacggcaagcagcagtaccgagtaccagtgtatcccagacagcaccatcccccaggaagactaccgctgctggccatcctaccaccacgggagctgcctcctttcagtgttcaacctggctgaggctgtggatgtctgtgagagccatgcccagtgtcgggcctttgtggtcaccaaccagaccacctggacaggtcggcagctggtctttttcaagactggatggagccaagtggtccctgatcccaacaagaccacatatgtgaaggcctctggc

SEQ ID NO: 4180 - DNA, 1581 bp, Homo Sapiens
tcttaccaagtgatctgcagagatgaaaaaacgcagatgatataccagcaacatcagtcatggctgcgccctgtgctcagaagcaaccgggtggaatattgctggtgcaacagtggcagggcacagtgccactcagtgcctgtcaaaagttgcagcgagccaaggtgtttcaacgggggcacctgccagcaggccctgtacttctcagatttcgtgtgccagtgccccgaaggatttgctgggaagtgctgtgaaatagataccagggccacgtgctacgaggaccagggcatcagctacaggggcacgtggagcacagcggagagtggcgccgagtgcaccaactggaacagcagcgcgttggcccagaagccctacagcgggcggaggccagatgccatcaggctgggcctggggaaccacaactactgcagaaacccagatcgagactcaaagccctggtgctacgtctttaaggcggggaagtacagctcagagttctgcagcacccctgcctgctctgagggaaacagtgactgctactttgggaatgggtcagcctaccgtggcacgcacagcctcaccgagtcgggtgcctcctgcctcccgtggaattccatgatcctgataggcaaggtttacacagcacagaaccccagtgcccaggcactgggcctgggcaaacataattactgccggaatcctgatggggatgccaagccctggtgccacgtgctgaagaaccgcaggctgacgtgggagtactgtgatgtgccctcctgctccacctgcggcctgagacagtacagccagcctcagtttcgcatcaaaggagggctcttcgccgacatcgcctcccacccctggcaggctgccatctttgccaagcacaggaggtcgcccggagagcggttcctgtgcgggggcatactcatcagctcctgctggattctctctgccgcccactgcttccaggagaggtttccgccccaccacctgacggtgatcttgggcagaacataccgggtggtccctggcgaggaggagcagaaatttgaagtcgaaaaatacattgtccataaggaattcgatgatgacacttacgacaatgacattgcgctgctgcagctgaaatcggattcgtcccgctgtgcccaggagagcagcgtggtccgcactgtgtgccttcccccggcggacctgcagctgccggactggacggagtgtgagctctccggctacggcaagcatgaggccttgtctcctttctattcggagcggctgaaggaggctcatgtcagactgtacccatccagccgctgcacatcacaacatttacttaacagaacagtcaccgacaacatgctgtgtgctggagacactcggagcggcgggccccaggcaaacttgcacgacgcctgccagggcgattcgggaggccccctggtgtgtctgaacgatggccgcatgactttggtgggcatcatcagctggggcctgggctgtggacagaaggatgtcccgggtgtgtacaccaaggttaccaactacctagactggattcgtgacaacatgcgaccg

SEQ ID NO: 4181 - DNA, 1233 bp, Homo Sapiens
agcaatgaacttcatcaagttccatcgaactgtgactgtctaaatggaggaacatgtgtgtccaacaagtacttctccaacattcactggtgcaactgcccaaagaaattcggagggcagcactgtgaaatagataagtcaaaaacctgctatgaggggaatggtcacttttaccgaggaaaggccagcactgacaccatgggccggccctgcctgccctggaactctgccactgtccttcagcaaacgtaccatgcccacagatctgatgctcttcagctgggcctggggaaacataattactgcaggaacccagacaaccggaggcgaccctggtgctatgtgcaggtgggcctaaagccgcttgtccaagagtgcatggtgcatgactgcgcagatggaaaaaagccctcctctcctccagaagaattaaaatttcagtgtggccaaaagactctgaggccccgctttaagattattgggggagaattcaccaccatcgagaaccagccctggtttgcggccatctacaggaggcaccgggggggctctgtcacctacgtgtgtggaggcagcctcatcagcccttgctgggtgatcagcgccacacactgcttcattgattacccaaagaaggaggactacatcgtctacctgggtcgctcaaggcttaactccaacacgcaaggggagatgaagtttgaggtggaaaacctcatcctacacaaggactacagcgctgacacgcttgctcaccacaacgacattgccttgctgaagatccgttccaaggagggcaggtgtgcgcagccatcccggactatacagaccatctgcctgccctcgatgtataacgatccccagtttggcacaagctgtgagatcactggctttggaaaagagaattctaccgactatctctatccggagcagctgaaaatgactgttgtgaagctgatttcccaccgggagtgtcagcagccccactactacggctctgaagtcaccaccaaaatgctgtgtgctgctgacccacagtggaaaacagattcctgccagggagactcagggggacccctcgtctgttccctccaaggccgcatgactttgactggaattgtgagctggggccgtggatgtgccctgaaggacaagccaggcgtctacacgagagtctcacacttcttaccctggatccgcagtcacaccaaggaagagaatggcctggccctc

SEQ ID NO: 4182 - DNA, 849 bp, Homo Sapiens
ctgcggtgcatgcagtgtaagaccaacggggattgccgtgtggaagagtgcgccctgggacaggacctctgcaggaccacgatcgtgcgcttgtgggaagaaggagaagagctggagctggtggagaaaagctgtacccactcagagaagaccaacaggaccctgagctatcggactggcttgaagatcaccagccttaccgaggttgtgtgtgggttagacttgtgcaaccagggcaactctggccgggctgtcacctattcccgaagccgttacctcgaatgcatttcctgtggctcatcagacatgagctgtgagaggggccggcaccagagcctgcagtgccgcagccctgaagaacagtgcctggatgtggtgacccactggatccaggaaggtgaagaagggcgtccaaaggatgaccgccacctccgtggctgtggctaccttcccggctgcccgggctccaatggtttccacaacaacgacaccttccacttcctgaaatgctgcaacaccaccaaatgcaacgagggcccaatcctggagcttgaaaatctgccgcagaatggccgccagtgttacagctgcaaggggaacagcacccatggatgctcctctgaagagactttcctcattgactgccgaggccccatgaatcaatgtctggtagccaccggcactcacgaaccgaaaaaccaaagctatatggtaagaggctgtgcaaccgcctcaatgtgccaacatgcccacctgggtgacgccttcagcatgaaccacattgatgtctcctgctgtactaaaagtggctgtaaccacccagacctggatgtccagtaccgcagtggg

SEQ ID NO: 4183 - DNA, 1497 bp, Homo Sapiens
actttgctcacccggcagccagccccgctgtcccagaagcagcggtcatttgtcacattccgaggagagcccgccgagggtttcaatcacctggtggtggatgagaggacaggacacatttacttgggggccgtcaatcggatttacaagctctccagcgacctgaaggtcttggtgacgcatgagacagggccggacgaggacaaccccaagtgttacccaccccgcatcgtccagacctgcaatgagcccctgaccaccaccaacaatgtcaacaagatgctcctcatagactacaaggagaacaggctgattgcctgtgggagcctgtaccaaggcatctgcaagctgctgaggctggaggacctcttcaagctgggggagccttatcataagaaggagcactatctgtcaggtgtcaacgagagcggctcagtctttggagtgatcgtctcctacagcaacctggatgacaagctgttcattgccacggcagtggatgggaagcccgagtattttcccaccatctccagccggaaactgaccaagaactctgaggcggatggcatgttcgcgtacgtcttccatgatgagttcgtggcctcgatgattaagatcccttcggacaccttcaccatcatccctgactttgatatctactatgtctatggttttagcagtggcaactttgtctactttttgaccctccaacctgagatggtgtctccaccaggctccaccaccaaggagcaggtgtatacatccaagctcgtgaggctttgcaaggaggacacagccttcaactcctatgtagaggtgcccattggctgtgagcgcagtggggtggagtaccgcctgctgcaggctgcctacctgtccaaagcgggggccgtgcttggcaggacccttggagtccatccagatgatgacctgctcttcaccgtcttctccaagggccagaagcggaaaatgaaatccctggatgagtcggccctgtgcatcttcatcttgaagcagataaatgaccgcattaaggagcggctgcagtcttgttaccggggcgagggcacgctggacctggcctggctcaaggtgaaggacatcccctgcagcagtgcgctcttaaccattgacgataacttctgtggcctggacatgaatgctcccctgggagtgtccgacatggtgcgtggaattcccgtcttcacggaggacagggaccgcatgacgtctgtcatcgcatatgtctacaagaaccactctctggcctttgtgggcaccaaaagtggcaagctgaagaagtccttcggcacaggtccacaaggcggaatcacccaggagtggattggagtggcgggagacccacctggggcgaacattgcttctcaggaacagatgctgtgtgtgtatcttcagtgctcaagtcacaaagcaatatcagatcagagagtccagcctctgctttgttgcttcctaaatgtacctgggaattcttcc

SEQ ID NO: 4184 - DNA, 1782 bp, Homo Sapiens
ggacctgtgcttgccgtgagggccccaggatttggccgaagtggcggccacagcctgagccccgaagagaacgaatttgcggaggaggagccggtgctggtactgagccctgaggagcccgggcctggcccagccgcggtcagctgcccccgagactgtgcctgttcccaggagggcgtcgtggactgtggcggtattgacctgcgtgagttcccgggggacctgcctgagcacaccaaccacctatctctgcagaacaaccagctggaaaagatctaccctgaggagctctcccggctgcaccggctggagacactgaacctgcaaaacaaccgcctgacttcccgagggctcccagagaaggcgtttgagcatctgaccaacctcaattacctgtacttggccaataacaagctgaccttggcaccccgcttcctgccaaacgccctgatcagtgtggactttgctgccaactatctcaccaagatctatgggctcacctttggccagaagccaaacttgaggtctgtgtacctgcacaacaacaagctggcagacgccgggctgccggacaacatgttcaacggctccagcaacgtcgaggtcctcatcctgtccagcaacttcctgcgccacgtgcccaagcacctgccgcctgccctgtacaagctgcacctcaagaacaacaagctggagaagatccccccgggggccttcagcgagctgagcagcctgcgcgagctatacctgcagaacaactacctgactgacgagggcctggacaacgagaccttctggaagctctccagcctggagtacctggatctgtccagcaacaacctgtctcgggtcccagctgggctgccgcgcagcctggtgctgctgcacttggagaagaacgccatccggagcgtggacgcgaatgtgctgacccccatccgcagcctggagtacctgctgctgcacagcaaccagctgcgggagcagggcatccacccactggccttccagggcctcaagcggttgcacacggtgcacctgtacaacaacgcgctggagcgcgtgcccagtggcctgcctcgccgcgtgcgcaccctcatgatcctgcacaaccagatcacaggcattggccgcgaagactttgccaccacctacttcctggaggagctcaacctcagctacaaccgcatcaccagcccacaggtgcaccgcgacgccttccgcaagctgcgcctgctgcgctcgctggacctgtcgggcaaccggctgcacacgctgccacctgggctgcctcgaaatgtccatgtgctgaaggtcaagcgcaatgagctggctgccttggcacgaggggcgctggcgggcatggctcagctgcgtgagctgtacctcaccagcaaccgactgcgcagccgagccctgggcccccgtgcctgggtggacctcgcccatctgcagctgctggacatcgccgggaatcagctcacagagatccccgaggggctccccgagtcacttgagtacctgtacctgcagaacaacaagattagtgcggtgcccgccaatgccttcgactccacgcccaacctcaaggggatctttctcaggtttaacaagctggctgtgggctccgtggtggacagtgccttccggaggctgaagcacctgcaggtcttggacattgaaggcaacttagagtttggtgacatttccaaggaccgtggccgcttggggaaggaaaaggaggaggaggaagaggaggaggaggaggaagaggaaacaaga

SEQ ID NO: 4185 - DNA, 1458 bp, Homo Sapiens
ttggaagacgctgccttcccccacctgggggagagcttgcagcccctgctccgggcctgtcccctgcgctgctcctgcccccgagtcgacactgtggactgtgatggcttggaccttcgagtgttcccggacaacatcaccagagccgctcagcacctctccctgcagaacaaccagctccaggaactcccctacaatgagctgtcccgcctcagtggcctgcgaaccctcaacctccacaacaacctcatctcctccgaaggcctgcctgacgaggccttcgagtccctcacccagctgcagcacctctgcgtggctcacaacaagctctcagtggcccctcagtttctgccccggtccctccgtgtcgcggatctggctgccaaccaagtgatggagatcttccccctcacctttggggagaagccggcactcaggtccgtgtacctccacaacaaccagctgagcaacgctggcctgccccccgacgccttccgcggctccgaggccatcgccaccctcagcctctccaacaaccagctcagctacctgccgcccagcctgccgccctcactcgagcggctccacctgcagaacaatctcatctccaaggtgccccgaggagccctgagccgccagactcaactccgtgagctctacctccagcacaaccagctgacagacagtggcctggatgccaccaccttcagcaagctgcatagccttgaatacctggatctctcccacaaccagctgaccacagtgcccgccggcctgccccggaccctggctatcctgcacctgggccgcaaccgcatccggcaggtggaggcggctcggctgcacggggcgcgtggtctgcgctatttgttgctgcagcacaaccagctggggagctcagggctgcccgccggggctctgcggccgctgcggggcctgcacacgctgcacctctatggcaatgggctggaccgcgtgcctccagccctgccccgccgcctgcgtgccctggtgctgccccacaaccacgtggccgcgctgggtgcccgtgacctggtcgccacaccgggcctgacggagcttaacctggcctataaccgcctggccagcgcccgtgtgcaccaccgggccttccgccggctgcgtgccctgcgcagcctcgacctggcagggaatcagctaacccggctgcccatgggcctgcccactggcctgcgcaccctgcagctgcaacgcaaccagctgcggatgctcgagcccgagcctctggccggcctggaccaactgcgggagctcagcctggcgcacaaccggctccgggtcggcgacatcgggccaggcacctggcatgagctccaagccctccaggtcaggcacaggctggttagccacactgtccccagggcccctccatccccctgcctgccctgccacgtcccaaacattctagttagctgg

SEQ ID NO: 4186 - DNA, 210 bp, Homo Sapiens
gctgaactccgctgcatgtgtataaagacaacctctggaattcatcccaaaaacatccaaagtttggaagtgatcgggaaaggaacccattgcaaccaagtcgaagtgatagccacactgaaggatgggaggaaaatctgcctggacccagatgctcccagaatcaagaaaattgtacagaaaaaattggcaggtgatgaatctgctgat

SEQ ID NO: 4187 - DNA, 804 bp, Homo Sapiens
gccaagggtggatccctcagagagagtcagggagtctgctccaagcagacactggtggtcccgctccactacaacgagtcctacagccaaccagtgtacaagccctacctgaccttgtgcgctgggaggcgcatctgcagcacttacaggaccatgtaccgcgttatgtggcgggaggtgaggcgggaggttcagcagacccatgcagtgtgctgccagggctggaagaagcggcacccgggggcgctcacctgtgaagccatctgcgccaagccttgcctgaacggaggcgtctgcgttaggcctgaccagtgcgagtgcgcccccggctggggagggaagcactgtcatgtggacgtggatgaatgtaggaccagcatcaccctctgctcgcaccattgttttaatacggcaggcagcttcacctgcggctgcccccatgacctagtgctaggcgtggacgggcgcacctgcatggaggggtccccagagcccccaaccagtgccagcatactcagcgtggccgttcgggaggcggaaaaagatgagcgcgctctgaagcaggagattcacgagctgcgagggcgcctggagcggctggagcagtgggccggtcaggctggggcctgggtcagagcggtgctgcccgtgccgcctgaagagctgcagccagaacaggtggctgagctgtggggccggggtgaccggatcgaatctctcagcgaccaggtgctgctgctggaggagaggctaggtgcctgctcctgtgaggacaacagcctgggcctcggcgtcaatcatcga

SEQ ID NO: 4188 - DNA, 1086 bp, Homo Sapiens
cagccaacaagacgaccaagacccgggactgggcccgggcgcagacccaggcccaggcccaggcccacacccagctttcctcagcctgatgaaccagcagagccaacagacctgcctcctcccctccctccaggccctccatctatcttccctgactgtccccgcgaatgctactgcccccctgatttcccatctgccctctactgtgatagccgcaacctgcgaaaggtccctgtcatcccgccccgcatccattacctctatctccagaacaacttcatcactgagctcccggtggagtccttccagaatgccacaggcctgcgatggattaacctggacaacaaccgaatccgcaagatagaccagagggtgctggagaaactgcccggcctggtgttcctctacatggagaagaaccagttggaagaggtcccctcggccctgccccggaacctggagcagctgaggctgagccagaaccacatctccagaatcccgcctggtgtcttcagcaagctggagaacctgctgctcctggatctccagcacaacaggctgagcgacggcgtcttcaagcccgacaccttccatggcctcaagaacctcatgcagctcaacctggcccacaacatcctgagaaagatgccgcccagggtccccaccgccattcaccagctctacctggacagtaacaagattgagaccatccctaacggatacttcaagagctttcccaatcttgccttcattcggcttaactacaacaagctgacagacaggggactccccaagaactcctttaatatctccaacctgcttgtgctccacctgtcccacaacaggatcagcagtgtgcccgccatcaacaacaggctggaacacctgtacctcaacaacaatagcatcgagaaaatcaacggaacccagatttgccccaacgacctagtggcgttccatgacttctcctcggacctggagaacgtgccacacctgcgctacctgcggctggatggaaactacttgaagccgcccatcccgctggacctcatgatgtgcttccgcctcctgcagtccgtggtcatc

SEQ ID NO: 4189 - DNA, 1602 bp, Homo Sapiens
ccgtgccacacagccgcacgctcagagtgcaagcgcagccacaagttcgtgcctggtgcatggctggccggggagggtgtggacgtgaccagcctccgccgctcgggctccttcccagtggacacacaaaggttcctgcggcccgacggcacctgcaccctctgtgaaaatgccctacaggagggcaccctccagcgcctgcctctggcgctcaccaactggcgggcccagggctctggctgccagcgccatgtaaccagggccaaagtcagctccactgaagctgtggcccgggatgcggctcgtagcatccgcaacgactggaaggtcgggctggacgtgactcctaagcccaccagcaatgtgcatgtgtctgtggccggctcacactcacaggcagccaactttgcagcccagaagacccaccaggaccagtacagcttcagcactgacacggtggagtgccgcttctacagtttccatgtggtacacactcccccgctgcaccctgacttcaagagggccctcggggacctgccccaccacttcaacgcctccacccagcccgcctacctcaggcttatctccaactacggcacccacttcatccgggctgtggagctgggtggccgcatatcggccctcactgccctgcgcacctgcgagctggccctggaagggctcacggacaacgaggtggaggactgcctgactgtcgaggcccaggtcaacataggcatccacggcagcatctctgccgaagccaaggcctgtgaggagaagaagaagaagcacaagatgacggcctccttccaccaaacctaccgggagcgccattcggaagtggttggcggccatcacacctccattaacgacctgctgttcgggatccaggccgggcccgagcagtactcagcctgggtaaactcgctgcccggcagccctggcctggtggactacaccctggaacccctgcacgtgctgctggacagccaggacccgcggcgggaggcactgaggagggccctgagtcagtacctgacggacagggctcgctggagggactgcagccggccgtgcccaccagggcggcagaagagcccccgagacccatgccagtgtgtgtgccatggctcagcggtcaccacccaggactgctgccctcggcagaggggcctggcccagctggaggtgaccttcatccaagcatggggcctgtggggggactggttcactgccacggatgcctatgtgaagctcttctttggtggccaggagctgaggacgagcaccgtgtgggacaataacaaccccatctggtcagtgcggctggattttggggatgtgctcctggccacaggggggcccctgaggttgcaggtctgggatcaggactctggcagggacgatgacctccttggcacctgtgatcaggctcccaagtctggttcccatgaggtgagatgcaacctgaatcatggccacctaaaattccgctatcatgccaggtgcttgccccacctgggaggaggcacctgcctggactatgtcccccaaatgcttctgggggagcctccaggaaaccggagtggggccgtgtgg

SEQ ID NO: 4190 - DNA, 351 bp, Homo Sapiens
acctgccgctacctcctggtgagaagtcttcagacgtttagtcaagcttggtttacttgccggaggtgctacaggggcaacctggtttccatccacaacttcaatattaattatcgaatccagtgttctgtcagcgcgctcaaccagggtcaagtctggattggaggcaggatcacaggctcgggtcgctgcagacgctttcagtgggttgacggcagccgctggaactttgcgtactgggctgctcaccagccctggtcccgcggtggtcactgcgtggccctgtgtacccgaggaggctactggcgtcgagcccactgcctcagaagacttcctttcatctgttcctac

SEQ ID NO: 4191 - DNA, 624 bp, Homo Sapiens
cttcatctggagaatgatgccccccatctggagagcctagagacacaggcagacctaggccaggatctggatagttcaaaggagcaggagagagacttggctctgacggaggaggtgattcaggcagagggagaggaggtcaaggcttctgcctgtcaagacaactttgaggatgaggaagccatggagtcggacccagctgccttagacaaggacttccagtgccccagggaagaagacattgttgaagtgcagggaagtccaaggtgcaagacctgccgctacctattggtgcggactcctaaaacttttgcagaagctcagaatgtctgcagcagatgctacggaggcaaccttgtctctatccatgacttcaacttcaactatcgcattcagtgctgcactagcacagtcaaccaagcccaggtctggattggaggcaacctcaggggctggttcctgtggaagcggttttgctggactgatgggagccactggaattttgcttactggtccccagggcaacctgggaatgggcaaggctcctgtgtggccctatgcaccaaaggaggttattggcgacgagctcaatgcgacaagcaactgcccttcgtctgctccttc

SEQ ID NO: 4192 - DNA, 630 bp, Homo Sapiens
cagttacctcctggaaaacctgagatctttaaatgtcgttctcccaataaggaaacattcacctgctggtggaggcctgggacagatggaggacttcctaccaattattcactgacttaccacagggaaggagagacactcatgcatgaatgtccagactacataaccggtggccccaactcctgccactttggcaagcagtacacctccatgtggaggacatacatcatgatggtcaatgccactaaccagatgggaagcagtttctcggatgaactttatgtggacgtgacttacatagttcagccagaccctcctttggagctggctgtggaagtaaaacagccagaagacagaaaaccctacctgtggattaaatggtctccacctaccctgattgacttaaaaactggttggttcacgctcctgtatgaaattcgattaaaacccgagaaagcagctgagtgggagatccattttgctgggcagcaaacagagtttaagattctcagcctacatccaggacagaaataccttgtccaggttcgctgcaaaccagaccatggatactggagtgcatggagtccagcgaccttcattcagatacctagtgacttcaccatgaatgat

SEQ ID NO: 4193 - DNA, 1257 bp, Homo Sapiens
gccaactccttcctggaggagctccgtcacagcagcctggagcgggagtgcatagaggagatctgtgacttcgaggaggccaaggaaattttccaaaatgtggatgacacactggccttctggtccaagcacgtcgacggtgaccagtgcttggtcttgcccttggagcacccgtgcgccagcctgtgctgcgggcacggcacgtgcatcgacggcatcggcagcttcagctgcgactgccgcagcggctgggagggccgcttctgccagcgcgaggtgagcttcctcaattgctctctggacaacggcggctgcacgcattactgcctagaggaggtgggctggcggcgctgtagctgtgcgcctggctacaagctgggggacgacctcctgcagtgtcaccccgcagtgaagttcccttgtgggaggccctggaagcggatggagaagaagcgcagtcacctgaaacgagacacagaagaccaagaagaccaagtagatccgcggctcattgatgggaagatgaccaggcggggagacagcccctggcaggtggtcctgctggactcaaagaagaagctggcctgcggggcagtgctcatccacccctcctgggtgctgacagcggcccactgcatggatgagtccaagaagctccttgtcaggcttggagagtatgacctgcggcgctgggagaagtgggagctggacctggacatcaaggaggtcttcgtccaccccaactacagcaagagcaccaccgacaatgacatcgcactgctgcacctggcccagcccgccaccctctcgcagaccatagtgcccatctgcctcccggacagcggccttgcagagcgcgagctcaatcaggccggccaggagaccctcgtgacgggctggggctaccacagcagccgagagaaggaggccaagagaaaccgcaccttcgtcctcaacttcatcaagattcccgtggtcccgcacaatgagtgcagcgaggtcatgagcaacatggtgtctgagaacatgctgtgtgcgggcatcctcggggaccggcaggatgcctgcgagggcgacagtggggggcccatggtcgcctccttccacggcacctggttcctggtgggcctggtgagctggggtgagggctgtgggctccttcacaactacggcgtttacaccaaagtcagccgctacctcgactggatccatgggcacatcagagacaaggaagccccccagaagagctgggcacct

SEQ ID NO: 4194 - DNA, 579 bp, Homo Sapiens
agccaagacgcctcagatggcctccaaagacttcatatgctccagatctcctacttccgcgacccctatcacgtgtggtaccagggcaacgcgtcgctggggggacacctaacgcacgtgctggaaggcccagacaccaacaccacgatcattcagctgcagcccttgcaggagcccgagagctgggcgcgcacgcagagtggcctgcagtcctacctgctccagttccacggcctcgtgcgcctggtgcaccaggagcggaccttggcctttcctctgaccatccgctgcttcctgggctgtgagctgcctcccgagggctctagagcccatgtcttcttcgaagtggctgtgaatgggagctcctttgtgagtttccggccggagagagccttgtggcaggcagacacccaggtcacctccggagtggtcaccttcaccctgcagcagctcaatgcctacaaccgcactcggtatgaactgcgggaattcctggaggacacctgtgtgcagtatgtgcagaaacatatttccgcggaaaacacgaaagggagccaaacaagccgctcctacacttcg

SEQ ID NO: 4195 - DNA, 1905 bp, Homo Sapiens
gcaaattctttacttgaagaaaccaaacagggtaatcttgaaagagaatgcatcgaagaactgtgcaataaagaagaagccagggaggtctttgaaaatgacccggaaacggattatttttatccaaaatacttagtttgtcttcgctcttttcaaactgggttattcactgctgcacgtcagtcaactaatgcttatcctgacctaagaagctgtgtcaatgccattccagaccagtgtagtcctctgccatgcaatgaagatggatatatgagctgcaaagatggaaaagcttcttttacttgcacttgtaaaccaggttggcaaggagaaaagtgtgaatttgacataaatgaatgcaaagatccctcaaatataaatggaggttgcagtcaaatttgtgataatacacctggaagttaccactgttcctgtaaaaatggttttgttatgctttcaaataagaaagattgtaaagatgtggatgaatgctctttgaagccaagcatttgtggcacagctgtgtgcaagaacatcccaggagattttgaatgtgaatgccccgaaggctacagatataatctcaaatcaaagtcttgtgaagatatagatgaatgctctgagaacatgtgtgctcagctttgtgtcaattaccctggaggttacacttgctattgtgatgggaagaaaggattcaaacttgcccaagatcagaagagttgtgaggttgtttcagtgtgccttcccttgaaccttgacacaaagtatgaattactttacttggcggagcagtttgcaggggttgttttatatttaaaatttcgtttgccagaaatcagcagattttcagcagaatttgatttccggacatatgattcagaaggcgtgatactgtacgcagaatctatcgatcactcagcgtggctcctgattgcacttcgtggtggaaagattgaagttcagcttaagaatgaacatacatccaaaatcacaactggaggtgatgttattaataatggtctatggaatatggtgtctgtggaagaattagaacatagtattagcattaaaatagctaaagaagctgtgatggatataaataaacctggacccctttttaagccggaaaatggattgctggaaaccaaagtatactttgcaggattccctcggaaagtggaaagtgaactcattaaaccgattaaccctcgtctagatggatgtatacgaagctggaatttgatgaagcaaggagcttctggaataaaggaaattattcaagaaaaacaaaataagcattgcctggttactgtggagaagggctcctactatcctggttctggaattgctcaatttcacatagattataataatgtatccagtgctgagggttggcatgtaaatgtgaccttgaatattcgtccatccacgggcactggtgttatgcttgccttggtttctggtaacaacacagtgccctttgctgtgtccttggtggactccacctctgaaaaatcacaggatattctgttatctgttgaaaatactgtaatatatcggatacaggccctaagtctatgttccgatcaacaatctcatctggaatttagagtcaacagaaacaatctggagttgtcgacaccacttaaaatagaaaccatctcccatgaagaccttcaaagacaacttgccgtcttggacaaagcaatgaaagcaaaagtggccacatacctgggtggccttccagatgttccattcagtgccacaccagtgaatgccttttataatggctgcatggaagtgaatattaatggtgtacagttggatctggatgaagccatttctaaacataatgatattagagctcactcatgtccatcagtttggaaaaagacaaagaattct

SEQ ID NO: 4196 - DNA, 1080 bp, Homo Sapiens
gcgggctcctatcttctggaagaactcttcgagggaaacttggaaaaagaatgttatgaagaaatctgtgtctatgaagaagcaagagaagtgtttgaaaatgaagtagtcactgatgaattctggagacgatataagggcggctccccgtgcatctcccagccctgcctccacaacggctcttgccaggacagcatctggggctacacctgcacctgctcccccggctatgagggcagcaactgcgagctggctaaaaatgaatgtcacccagagcggactgatgggtgtcaacacttctgcctcccaggacaggaatcctacacgtgcagctgtgctcagggctacaggcttggtgaggaccacaaacagtgtgtgccccacgaccagtgtgcctgcggggtgctgacctctgagaagcgtgcaccggatctacaggacctcccgtggcaggtaaagttaacaaattccgaaggaaaagacttctgtggtggtgttataatacgggaaaattttgtactgacaacagcaaaatgttcactgttacacaggaatattactgtaaaaacatattttaacagaacgagccaagacccgctgatgatcaagataacgcacgtccatgtgcacatgcggtatgacgcggacgcgggggagaatgacctgtcactgctggagctggagtggcccatccagtgcccaggtgcggggctccccgtgtgcacccctgagaaagacttcgctgagcacctcctcatcccacgcaccaggggcctcctcagcggctgggcacgcaatggcactgacctgggcaactcgctgaccacgcggcctgtcacacttgtggagggggaggagtgcgggcaggtcctgaatgtgactgtcaccaccaggacctactgtgagagaagcagcgtggcggccatgcactggatggatggaagtgtggtcaccagagaacacagaggctcctggtttctcacgggggtcctgggctcgcagccagtaggagggcaggctcacatggtccttgtcaccaaggtctccaggtactcactctggtttaaacagatcatgaac

SEQ ID NO: 4197 - DNA, 2742 bp, Homo Sapiens
tttagcgaactgtcttttgtaaaagaaccacaggatgtaactgtcacaagaaaggacccagtcgttttagattgccaggctcacggagaagttcctattaaggtcacatggttgaaaaatggagcaaaaatgtctgaaaataaacggatcgaggttctttctaacggctctttatacatcagtgaggtggaaggcaggcgaggagagcagtccgatgaaggattttatcagtgcttggcaatgaacaaatatggagccattcttagtcaaaaagctcatcttgccttatcaactatttctgcatttgaagtccagccaatttccactgaggtccacgaaggtggagttgctcgatttgcatgcaagatttcatcccaccctcctgcagtcataacatgggagttcaatcggacaactctacctatgactatggacaggataactgccctaccaacaggagtattgcagatctatgatgtcagccaaagggattctggaaattatcgttgtattgctgccactgtagcccaccgacgtaaaagtatggaggcctcgctaactgtgattccagctaaggagtcaaaatccttccacacaccaacaattatagcaggtccacagaacataacaacatctcttcatcagactgtagttttggaatgcatggccacaggaaatcccaaaccaatcatttcttggagccgccttgatcacaaatccattgatgtctttaatactcgggtacttggaaatggtaatctcatgatatctgatgtcaggctacaacatgctggagtatatgtttgtcgggccactacccctggcacacgcaactttacagttgctatggcaactttaactgtattagctcctccttcatttgttgaatggccagaaagtttaacaaggcctcgagctggcactgctcgatttgtgtgtcaggcagaaggaatcccctctcccaagatgtcatggttgaaaaatggaaggaagatacattcgaatggtagaattaaaatgtacaacagtaaattggtaattaaccagattattcctgaagatgatgctatttatcagtgcatggctgagaatagccaaggatctattttatctagagccagactgactgtagtgatgtcagaagacagacccagtgctccctataatgtacatgctgaaaccatgtcaagctcagccattcttttagcctgggagaggccactttataattcagacaaagtcattgcctattctgtacactacatgaaagcagaaggtttaaataatgaagagtatcaagtagtcatcggaaatgacacaactcattatattattgatgacttagagcctgccagcaattatactttctacattgtagcatatatgccaatgggagccagccagatgtctgaccatgtgacacagaatactctagaggatgttcccctgagacctcctgaaattagtttgacaagtcgaagtcccactgatattctcatctcctggctgccaatcccagccaaatatcggcggggccaagtggtgctgtatcgcttgtctttccgcctaagtactgagaattcaatccaagttctggagctcccggggaccacgcatgagtaccttttggaaggcctgaaacctgacagtgtctacctggttcggattactgctgccaccagagtggggctgggagagtcatcagtatggacttcacataggacgcccaaagctacaagcgtgaaagcccctaagtctccagagttgcatttggagcctctgaactgtaccaccatttctgtgaggtggcagcaagatgtagaggacacagctgctattcagggctacaagctgtactacaaggaagaagggcagcaggagaatgggcccattttcttggataccaaggacctactctatactctcagtggcttagaccccagaagaaaatatcatgtgagactcctggcttacaacaacatagacgatggctatcaggcagatcagactgtcagcactccaggatgcgtgtctgttcgtgatcgcatggtccctcctccaccaccaccccaccatctctatgcgaaggctaacacctcatcttccatcttcctgcactggaggaggcctgcattcaccgctgcacaaatcattaactacaccatccgctgtaatcctgttggcctgcagaatgcttctttggttctgtaccttcaaacatcagaaactcacatgttggttcaaggtctagaaccaaacaccaaatacgaatttgccgttcgattacatgtggatcagctttccagtccttggagccctgtagtctaccattctactcttccagaagcaccagcaggcccaccagttggagtaaaagtgacattaatagaggatgacactgccctggtttcttggaaaccccctgatggcccagaaacagttgtgacccgctatactatcttatatgcatctaggaaggcctggattgcaggagagtggcaggtcttacaccgtgaaggggcaataaccatggctttgctagaaaacttggtagcaggaaatgtgtacattgtcaagatatctgcatccaatgaggtgggagaaggacccttttcaaattctgtggagctggcagtacttccaaaggaaacctctgaatcaaatcagaggcccaagcgtttagattctgctgatgccaaagtttattcaggatattaccatctggaccaaaaatcaatgact

SEQ ID NO: 4198 - DNA, 1161 bp, Homo Sapiens
ctgctctgccagtttgggacagttcagcatgtgtggaaggtgtccgacctgccccggcaatggacccctaagaacaccagctgcgacagcggcttggggtgccaggacacgttgatgctcattgagagcggaccccaagtgagcctggtgctctccaagggctgcacggaggccaaggaccaggagccccgcgtcactgagcaccggatgggccccggcctctccctgatctcctacaccttcgtgtgccgccaggaggacttctgcaacaacctcgttaactccctcccgctttgggccccacagcccccagcagacccaggatccttgaggtgcccagtctgcttgtctatggaaggctgtctggaggggacaacagaagagatctgccccaaggggaccacacactgttatgatggcctcctcaggctcaggggaggaggcatcttctccaatctgagagtccagggatgcatgccccagccaggttgcaacctgctcaatgggacacaggaaattgggcccgtgggtatgactgagaactgcaataggaaagattttctgacctgtcatcgggggaccaccattatgacacacggaaacttggctcaagaacccactgattggaccacatcgaataccgagatgtgcgaggtggggcaggtgtgtcaggagacgctgctgctcatagatgtaggactcacatcaaccctggtggggacaaaaggctgcagcactgttggggctcaaaattcccagaagaccaccatccactcagcccctcctggggtgcttgtggcctcctatacccacttctgctcctcggacctgtgcaatagtgccagcagcagcagcgttctgctgaactccctccctcctcaagctgcccctgtcccaggagaccggcagtgtcctacctgtgtgcagccccttggaacctgttcaagtggctccccccgaatgacctgccccaggggcgccactcattgttatgatgggtacattcatctctcaggaggtgggctgtccaccaaaatgagcattcagggctgcgtggcccaaccttccagcttcttgttgaaccacaccagacaaatcgggatcttctctgcgcgtgagaagcgtgatgtgcagcctcctgcctctcagcatgagggaggt

SEQ ID NO: 4199 - DNA, 225 bp, Homo Sapiens
ctgctgtgctactcctgcaaagcccaggtgagcaacgaggactgcctgcaggtggagaactgcacccagctgggggagcagtgctggaccgcgcgcatccgcgcagttggcctcctgaccgtcatcagcaaaggctgcagcttgaactgcgtggatgactcacaggactactacgtgggcaagaagaacatcacgtgctgtgacaccgacttgtgcaacgccagc

SEQ ID NO: 4200 - DNA, 1155 bp, Homo Sapiens
caagtcacgattgaagccgagccaaccaaagtttccgaggggaaggatgttcttctacttgtccacaatttgccccagaatcttaccggctacatctggtacaaagggcaaatgagggacctctaccattacattacatcatatgtagtagacggtgaaataattatatatgggcctgcatatagtggacgagaaacagcatattccaatgcatccctgctgatccagaatgtcacccgggaggacgcaggatcctacaccttacacatcataaagggagatgatgggactagaggagtaactggacgtttcaccttcaccttacacctggagactcctaagccctccatctccagcagcaacttaaatcccagggagaccatggaggctgtgagcttaacctgtgaccctgagactccagacgcaagctacctgtggtggatgaatggtcagagcctccctatgactcacagcttgaagctgtccgaaaccaacaggaccctctttctattgggtgtcacaaagtatactgcaggaccctatgaatgtgaaatacggaacccagtgagtgccagccgcagtgacccagtcaccctgaatctcctcccgaagctgcccaagccctacatcaccatcaacaacttaaaccccagggagaataaggatgtcttaaacttcacctgtgaacctaagagtgagaactacacctacatttggtggctaaatggtcagagcctcccggtcagtcccagggtaaagcgacccattgaaaacaggatcctcattctacccagtgtcacgagaaatgaaacaggaccctatcaatgtgaaatacgggaccgatatggtggcatccgcagtgacccagtcaccctgaatgtcctctatggtccagacctccccagaatttacccttcattcacctattaccgttcaggagaagtcctctacttgtcctgttctgcggactctaacccaccggcacagtattcttggacaattaatgaaaagtttcagctaccaggacaaaagctctttatccgccatattactacaaagcatagcgggctctatgtttgctctgttcgtaactcagccactggcaaggaaagctccaaatccatgacagtcgaagtctctgactggacagttccc

SEQ ID NO: 4201 - DNA, 1176 bp, Homo Sapiens
caagtcacgattgaagccgagccaaccaaagtttccgaggggaaggatgttcttctacttgtccacaatttgccccagaatcttaccggctacatctggtacaaagggcaaatgagggacctctaccattacattacatcatatgtagtagacggtgaaataattatatatgggcctgcatatagtggacgagaaacagcatattccaatgcatccctgctgatccagaatgtcacccgggaggacgcaggatcctacaccttacacatcataaagggagatgatgggactagaggagtaactggacgtttcaccttcaccttacacctggagactcctaagccctccatctccagcagcaacttaaatcccagggagaccatggaggctgtgagcttaacctgtgaccctgagactccagacgcaagctacctgtggtggatgaatggtcagagcctccctatgactcacagcttgaagctgtccgaaaccaacaggaccctctttctattgggtgtcacaaagtatactgcaggaccctatgaatgtgaaatacggaacccagtgagtgccagccgcagtgacccagtcaccctgaatctcctcccgaagctgcccaagccctacatcaccatcaacaacttaaaccccagggagaataaggatgtcttaaacttcacctgtgaacctaagagtgagaactacacctacatttggtggctaaatggtcagagcctcccggtcagtcccagggtaaagcgacccattgaaaacaggatcctcattctacccagtgtcacgagaaatgaaacaggaccctatcaatgtgaaatacgggaccgatatggtggcatccgcagtgacccagtcaccctgaatgtcctctatggtccagacctccccagaatttacccttcattcacctattaccgttcaggagaagtcctctacttgtcctgttctgcggactctaacccaccggcacagtattcttggacaattaatgaaaagtttcagctaccaggacaaaagctctttatccgccatattactacaaagcatagcgggctctatgtttgctctgttcgtaactcagccactggcaaggaaagctccaaatccatgacagtcgaagtctctggtaagtggatcccagcatcgttggcaatagggttt

SEQ ID NO: 4202 - DNA, 927 bp, Homo Sapiens
caagtcacgattgaagcccagccaccaaaagtttccgaggggaaggatgttcttctacttgtccacaatttgccccagaatcttactggctacatctggtacaaagggcaaatcagggacctctaccattacattacatcatatgtagtagacggtcaaataattatatatgggcctgcatatagtggacgagaaacagcatattccaatgcatccctgctgatccagaatgtcacccgggaggacgcaggatcctacaccttacacatcataaagcgaggtgatgggactagaggagtaactggatatttcaccttcaccttatacctggagactcccaagccctccatctccagcagcaacttaaaccccagggaggccatggaaactgtgatcttaacctgtgatcctgagactccggacacaagctaccagtggtggatgaatggtcagagcctccctatgactcacaggtttcagctgtccgaaaccaacaggaccctctttctatttggtgtcacaaagtatactgcaggaccctatgaatgtgaaatacggaactcagggagtgccagccgcagtgacccagtcaccctgaatctcctccatggtccagacctccccagaattcacccttcatacaccaattaccgttcaggagataacctctacttgtcttgcttcgcgaactctaacccaccggcacagtattcttggacaattaatgggaagtttcagcaatcaggacaaaatctgtttatcccccaaattactacaaagcatagcgggctctatgtttgctctgttcgtaactcagccactggcgaggaaagctccacgtcgttgacagtcaaagtctctgcttctacaagaataggacttcttcctctccttaatccaacatggatccacccagctttcttgtac

SEQ ID NO: 4203 - DNA, 903 bp, Homo Sapiens
caagtcacgattgaagcccagccaccaaaagtttccgaggggaaggatgttcttctacttgtccacaatttgccccagaatcttactggctacatctggtacaaagggcaaatcagggacctctaccattacattacatcatatgtagtagacggtcaaataattatatatgggcctgcatatagtggacgagaaacagcatattccaatgcatccctgctgatccagaatgtcacccgggaggacgcaggatcctacaccttacacatcataaagcgaggtgatgggactagaggagtaactggatatttcaccttcaccttatacctggagactcccaagccctccatctccagcagcaacttaaaccccagggaggccatggaaactgtgatcttaacctgtgatcctgagactccggacacaagctaccagtggtggatgaatggtcagagcctccctatgactcacaggtttcagctgtccgaaaccaacaggaccctctttctatttggtgtcacaaagtatactgcaggaccctatgaatgtgaaatacggaactcagggagtgccagccgcagtgacccagtcaccctgaatctcctccatggtccagacctccccagaattcacccttcatacaccaattaccgttcaggagataacctctacttgtcttgcttcgcgaactctaacccaccggcacagtattcttggacaattaatgggaagtttcagcaatcaggacaaaatctgtttatcccccaaattactacaaagcatagcgggctctatgtttgctctgttcgtaactcagccactggcgaggaaagctccacgtcgttgacagtcaaagtctctgcttctacaagaataggacttcttcctctccttaatccaaca

SEQ ID NO: 4204 - DNA, 1155 bp, Homo Sapiens
caagtcacgattgaagccgagccaaccaaagtttccgaggggaaggatgttcttctacttgtccacaatttgccccagaatcttaccggctacatctggtacaaagggcaaatgagggacctctaccattacattacatcatatgtagtagacggtgaaataattatatatgggcctgcatatggtggacgagaaacagcatattccaatgcatccctgctgatccagaatgtcacccgggaggacgcaggatcctacaccttacacatcataaagggagatgatgggactagaggagtaactggacgtttcaccttcaccttacacctggagactcctaagccctccatctccagcagcaacttaaatcccagggagaccatggaggctgtgagcttaacctgtgaccctgagactccagacgcaagctacctgtggtggatgaatggtcagagcctccctatgactcacagcttgaagctgtccgaaaccaacaggaccctctttctattgggtgtcacaaagtatactgcaggaccctatgaatgtgaaatacggaacccagtgagtgccagccgcagtgacccagtcaccctgaatctcctcccaaagctgtccaagccctacatcacaatcaacaacttaaaccccagagagaataaggatgtcttaaccttcacctgtgaacctaagagtgagaactacacctacatttggtggctaaatggtcagagcctccctgtcagtcccagggtaaagcgacccattgaaaacaggatcctcattctacccaatgtcacgagaaatgaaacaggaccttatcaatgtgaaatacgggaccgatatggtggcatccgcagtgacccagtcaccctgaatgtcctctatggtccagacctccccagcatttacccttcattcacctattaccgttcaggagaaaacctctacttgtcctgcttcgccgagtctaacccacgggcacaatattcttggacaattaatgggaagtttcagctatcaggacaaaagctctctatcccccaaataactacaaagcatagtgggctctatgcttgctctgttcgtaactcagccactggcaaggaaagctccaaatccatcacagtcaaagtctctgactggatattaccc

SEQ ID NO: 4205 - DNA, 1155 bp, Homo Sapiens; identical to SEQ ID NO: 4204

SEQ ID NO: 4206 - DNA, 903 bp, Homo Sapiens
caagtcacgattgaagccctgccacccaaagtttccgaggggaaggatgttcttctacttgtccacaatttgcctcagaatcttgctggctacatctggtacaaaggacaactgatggacctctaccattacattacatcatatgtagtagacggtcaaataaatatatatgggcctgcatacactggacgagaaacagtatattccaatgcatccctgctgatccagaatgtcacccgggaagacgcaggatcctataccttacacatcataaagcgaggtgataggactagaggagtaactggatatttcaccttcaacttatacctgaagctgcccaagccctacatcaccatcaacaactcaaaacccagggagaataaggatgtcttagccttcacctgtgaacctaagagtgagaactacacctacatttggtggctaaatggtcagagcctcccggtcagtcccagggtaaagcaacccattgaaaacaggatcctcattctacccagtgtcacgagaaatgaaacaggaccctatgaatgtgaaatacgggaccgagatggtggcatgcacagtgacccagtcaccctgaatgtcctctatggtccagacctccccagcatttacccttcattcacctattaccgttcaggagaaaacctctacttgtcctgcttcgcggaatctaacccaccggcagagtatttttggacaattaatgggaagtttcagcaatcaggacaaaagctctctatcccccaaattactacaaagcatagagggctctatacttgctctgttcgtaactcagccactggcaaggaaagctccaaatccatgacagtcgaagtctctgctccttcaggaataggacgtcttcctctccttaatccaata

SEQ ID NO: 4207 - DNA, 1170 bp, Homo Sapiens
caagtaataattgaagccaagccacccaaagtttccgaggggaaggatgttcttctacttgtccacaatttgccccagaatcttactggctacatctggtacaaagggcaaatgacggacctctaccattacattacatcatatgtagtacacggtcaaattatatatgggcctgcctacagtggacgagaaacagtatattccaatgcatccctgctgatccagaatgtcacacaggaggatgcaggatcctacaccttacacatcataaagcgaggcgatgggactggaggagtaactggatatttcactgtcaccttatactcggagactcccaagccctccatctccagcagcaacttaaaccccagggaggtcatggaggctgtgcgcttaatctgtgatcctgagactccggatgcaagctacctgtggttgctgaatggtcagaacctccctatgactcacaggttgcagctgtccaaaaccaacaggaccctctatctatttggtgtcacaaagtatattgcaggaccctatgaatgtgaaatacggaacccagtgagtgccagccgcagtgacccagtcaccctgaatctcctcccgaagctgcccatgccttacatcaccatcaacaacttaaaccccagggagaagaaggatgtgttagccttcacctgtgaacctaagagtcggaactacacctacatttggtggctaaatggtcagagcctcccggtcagtccgagggtaaagcgacccattgaaaacaggatactcattctacccagtgtcacgagaaatgaaacaggaccctatcaatgtgaaatacgggaccgatatggtggcatccgcagtaacccagtcaccctgaatgtcctctatggtccagacctccccagaatttacccttcattcacctattaccgttcaggagaaaacctcgacttgtcctgctttgcggactctaacccaccggcagagtattcttggacaattaatgggaagtttcagctatcaggacaaaagctctttatcccccaaattactacaaatcatagcgggctctatgcttgctctgttcgtaactcagccactggcaaggaaatctccaaatccatgatagtcaaagtctctggtccctgccatggaaaccagacagagtctcat

SEQ ID NO: 4208 - DNA, 1176 bp, Homo Sapiens
caagtcacgattgaagcccagccaaccaaagtttctgaggggaaggatgttcttctacttgtccacaatttgccccagaatcttactggctacatctggtacaaagggcaaatcagggacctctaccattacattacatcatatgtagtagacggtcaaataattatatatgggcctgcatacagtggacgagaaacaatatattccaatgcatccctgctgatccagaatgtcacccaggaagacgcaggatcctacaccttacacatcataatgggaggtgatgagaatagaggagtaactggacatttcaccttcaccttatatctggagactcccaagccctccatctccagcagcaaattaaaccccagggaggccatggaggctgtgagcttaacctgtgatcctgagactccggacgcaagctacctgtggtggatgaatggtcagagcctccctatgtctcacaggttgcagttgtctgaaaccaacaggaccctctttctattgggtgtcacaaagtacactgcaggaccctatgaatgtgaaatacggaacccagtgagtgccagccgcagtgacccattcaccctgaatctcctcccgaagctgcccaagccctacatcaccatcaacaacttaaaacccagggagaataaggatgtcttaaacttcacctgtgaacctaagagtgagaactacacctacatttggtggctaaatggtcagagcctcccggtcagtcccagggtaaagcgacccattgaaaacaggatcctcattctacccagtgtcacgagaaatgaaacaggaccctatcaatgtgaaataagggaccaatatggtggcatccgcagttacccagtcaccctgaatgtcctctatggtccagacctccccagaatttacccttcattcacctattaccgttcaggagaagtcctctacttgtcctgttctgcggactctaacccaccggcacagtattcttggacaattaatgggaagtttcagctatcaggacaaaagctctttatcccccaaattactacaaagcatagcgggctctatgcttgctctgttcgtaactcagccactggcaaggaaagctccaaatccatgacagtaaaagtctctggtaagcggatcccagtatccttggcaatagggatt

SEQ ID NO: 4209 - DNA, 1176 bp, Homo Sapiens
gaagtcacgattgaagcccagccacccaaagtttctgaggggaaggatgttcttctacttgtccacaatttgccccagaatcttcctggctacttctggtacaaaggggaaatgacggacctctaccattacattatatcgtatatagttgatggtaaaataattatatatgggcctgcatacagtggaagagaaacagtatattccaacgcatccctgctgatccagaatgtcacccggaaggatgcaggaacctacaccttacacatcataaagcgaggtgatgagactagagaagaaattcgacatttcaccttcaccttatacttggagactcccaagccctacatctccagcagcaacttaaaccccagggaggccatggaggctgtgcgcttaatctgtgatcctgagactctggacgcaagctacctatggtggatgaatggtcagagcctccctgtgactcacaggttgcagctgtccaaaaccaacaggaccctctatctatttggtgtcacaaagtatattgcaggaccctatgaatgtgaaatacggaacccagtgagtgccagtcgcagtgacccagtcaccctgaatctcctcccgaagctgcccatcccctacatcaccatcaacaacttaaaccccagggagaataaggatgtcttagccttcacctgtgaacctaagagtgagaactacacctacatttggtggctaaacggtcagagcctccccgtcagtcccggggtaaagcgacccattgaaaacaggatactcattctacccagtgtcacgagaaatgaaacaggaccctatcaatgtgaaatacaggaccgatatggtggcctccgcagtaacccagtcatcctaaatgtcctctatggtccagacctccccagaatttacccttcattcacctattaccgttcaggagaaaacctcgacttgtcctgcttcacggaatctaacccaccggcagagtatttttggacaattaatgggaagtttcagcaatcaggacaaaagctctttatcccccaaattactagaaatcatagcgggctctatgcttgctctgttcataactcagccactggcaaggaaatctccaaatccatgacagtcaaagtctctggtccctgccatggagacctgacagagtctcagtca

SEQ ID NO: 4210 - DNA, 405 bp, Homo Sapiens
tggggccccgatgcccgtggggttcccgtggccgatggagagttctcgtctgaacaggtggcaaaggctggagggacctggctgggcacccaccgcccccttgcccgcctgcgccgagccctgtctggtccatgccagctgtggagcctgaccctgtccgtggcagagctaggcctgggctacgcctcagaggagaaggtcatcttccgctactgcgccggcagctgcccccgtggtgcccgcacccagcatggcctggcgctggcccggctgcagggccagggccgagcccacggcgggccctgctgccggcccactcgctacaccgacgtggccttcctcgatgaccgccaccgctggcagcggctgccccagctctcggcggctgcctgcggctgtggtggc

SEQ ID NO: 4211 - DNA, 1728 bp, Homo Sapiens
gcggacccaggggcgcccacgccagtgaatccctgttgttactatccatgccagcaccagggcatctgtgtccgcttcggccttgaccgctaccagtgtgactgcacccgcacgggctattccggccccaactgcaccatccctggcctgtggacctggctccggaattcactgcggcccagcccctctttcacccacttcctgctcactcacgggcgctggttctgggagtttgtcaatgccaccttcatccgagagatgctcatgcgcctggtactcacagtgcgctccaaccttatccccagtccccccacctacaactcagcacatgactacatcagctgggagtctttctccaacgtgagctattacactcgtattctgccctctgtgcctaaagattgccccacacccatgggaaccaaagggaagaagcagttgccagatgcccagctcctggcccgccgcttcctgctcaggaggaagttcatacctgacccccaaggcaccaacctcatgtttgccttctttgcacaacacttcacccaccagttcttcaaaacttctggcaagatgggtcctggcttcaccaaggccttgggccatggggtagacctcggccacatttatggagacaatctggagcgtcagtatcaactgcggctctttaaggatgggaaactcaagtaccaggtgctggatggagaaatgtacccgccctcggtagaagaggcgcctgtgttgatgcactacccccgaggcatcccgccccagagccagatggctgtgggccaggaggtgtttgggctgcttcctgggctcatgctgtatgccacgctctggctacgtgagcacaaccgtgtgtgtgacctgctgaaggctgagcaccccacctggggcgatgagcagcttttccagacgacccgcctcatcctcataggggagaccatcaagattgtcatcgaggagtacgtgcagcagctgagtggctatttcctgcagctgaaatttgacccagagctgctgttcggtgtccagttccaataccgcaaccgcattgccatggagttcaaccatctctaccactggcaccccctcatgcctgactccttcaaggtgggctcccaggagtacagctacgagcagttcttgttcaacacctccatgttggtggactatggggttgaggccctggtggatgccttctctcgccagattgctggccggatcggtgggggcaggaacatggaccaccacatcctgcatgtggctgtggatgtcatcagggagtctcgggagatgcggctgcagcccttcaatgagtaccgcaagaggtttggcatgaaaccctacacctccttccaggagctcgtaggagagaaggagatggcagcagagttggaggaattgtatggagacattgatgcgttggagttctaccctggactgcttcttgaaaagtgccatccaaactctatctttggggagagtatgatagagattggggctcccttttccctcaagggtctcctagggaatcccatctgttctccggagtactggaagccgagcacatttggcggcgaggtgggctttaacattgtcaagacggccacactgaagaagctggtctgcctcaacaccaagacctgtccctacgtttccttccgtgtgccggatgccagtcaggatgatgggcctgctgtggagcgaccatccacagagctc

SEQ ID NO: 4212 - DNA, 1761 bp, Homo Sapiens
gcaaatccttgctgttcccacccatgtcaaaaccgaggtgtatgtatgagtgtgggatttgaccagtataagtgcgattgtacccggacaggattctatggagaaaactgctcaacaccggaatttttgacaagaataaaattatttctgaaacccactccaaacacagtgcactacatacttacccacttcaagggattttggaacgttgtgaataacattcccttccttcgaaatgcaattatgagttatgtgttgacatccagatcacatttgattgacagtccaccaacttacaatgctgactatggctacaaaagctgggaagccttctctaacctctcctattatactagagcccttcctcctgtgcctgatgattgcccgactcccttgggtgtcaaaggtaaaaagcagcttcctgattcaaatgagattgtggaaaaattgcttctaagaagaaagttcatccctgatccccagggctcaaacatgatgtttgcattctttgcccagcacttcacgcatcagtttttcaagacagatcataagcgagggccagctttcaccaacgggctgggccatggggtggacttaaatcatatttacggtgaaactctggctagacagcgtaaactgcgccttttcaaggatggaaaaatgaaatatcagataattgatggagagatgtatcctcccacagtcaaagatactcaggcagagatgatctaccctcctcaagtccctgagcatctacggtttgctgtggggcaggaggtctttggtctggtgcctggtctgatgatgtatgccacaatctggctgcgggaacacaacagagtatgcgatgtgcttaaacaggagcatcctgaatggggtgatgagcagttgttccagacaagcaggctaatactgataggagagactattaagattgtgattgaagattatgtgcaacacttgagtggctatcacttcaaactgaaatttgacccagaactacttttcaacaaacaattccagtaccaaaatcgtattgctgctgaatttaacaccctctatcactggcatccccttctgcctgacacctttcaaattcatgaccagaaatacaactatcaacagtttatctacaacaactctatattgctggaacatggaattacccagtttgttgaatcattcaccaggcaaattgctggcagggttgctggtggtaggaatgttccacccgcagtacagaaagtatcacaggcttccattgaccagagcaggcagatgaaataccagtcttttaatgagtaccgcaaacgctttatgctgaagccctatgaatcatttgaagaacttacaggagaaaaggaaatgtctgcagagttggaagcactctatggtgacatcgatgctgtggagctgtatcctgcccttctggtagaaaagcctcggccagatgccatctttggtgaaaccatggtagaagttggagcaccattctccttgaaaggacttatgggtaatgttatatgttctcctgcctactggaagccaagcacttttggtggagaagtgggttttcaaatcatcaacactgcctcaattcagtctctcatctgcaataacgtgaagggctgtccctttacttcattcagtgttccagatccagagctcattaaaacagtcaccatcaatgcaagttcttcccgctccggactagatgatatcaatcccacagtactactaaaagaacgttcgactgaactg

SEQ ID NO: 4213 - DNA, 2022 bp, Homo Sapiens
gccattgtcttcatcaagcagccgtcctcccaggatgcactgcaggggcgccgggcgctgcttcgctgtgaggttgaggctccgggcccggtacatgtgtactggctgctcgatggggcccctgtccaggacacggagcggcgtttcgcccagggcagcagcctgagctttgcagctgtggaccggctgcaggactctggcaccttccagtgtgtggctcgggatgatgtcactggagaagaagcccgcagtgccaacgcctccttcaacatcaaatggattgaggcaggtcctgtggtcctgaagcatccagcctcggaagctgagatccagccacagacccaggtcacacttcgttgccacattgatgggcaccctcggcccacctaccaatggttccgagatgggacccccctttctgatggtcagagcaaccacacagtcagcagcaaggagcggaacctgacgctccggccagctggtcctgagcatagtgggctgtattcctgctgcgcccacagtgcttttggccaggcttgcagcagccagaacttcaccttgagcattgctgatgaaagctttgccagggtggtgctggcaccccaggacgtggtagtagcgaggtatgaggaggccatgttccattgccagttctcagcccagccacccccgagcctgcagtggctctttgaggatgagactcccatcactaaccgcagtcgccccccacacctccgcagagccacagtgtttgccaacgggtctctgctgctgacccaggtccggccacgcaatgcagggatctaccgctgcattggccaggggcagaggggcccacccatcatcctggaagccacacttcacctagcagagattgaagacatgccgctatttgagccacgggtgtttacagctggcagcgaggagcgtgtgacctgccttccccccaagggtctgccagagcccagcgtgtggtgggagcacgcgggagtccggctgcccacccatggcagggtctaccagaagggccacgagctggtgttggccaatattgctgaaagtgatgctggtgtctacacctgccacgcggccaacctggctggtcagcggagacaggatgtcaacatcactgtggccactgtgccctcctggctgaagaagccccaagacagccagctggaggagggcaaacccggctacttggattgcctgacccaggccacaccaaaacctacagttgtctggtacagaaaccagatgctcatctcagaggactcacggttcgaggtcttcaagaatgggaccttgcgcatcaacagcgtggaggtgtatgatgggacatggtaccgttgtatgagcagcaccccagccggcagcatcgaggcgcaagcccgtgtccaagtgctggaaaagctcaagttcacaccaccaccccagccacagcagtgcatggagtttgacaaggaggccacggtgccctgttcagccacaggccgagagaagcccactattaagtgggaacgggcagatgggagcagcctcccagagtgggtgacagacaacgctgggaccctgcattttgcccgggtgactcgagatgacgctggcaactacacttgcattgcctccaacgggccgcagggccagattcgtgcccatgtccagctcactgtggcagtttttatcaccttcaaagtggaaccagagcgtacgactgtgtaccagggccacacagccctactgcagtgcgaggcccagggggaccccaagccgctgattcagtggaaaggcaaggaccgcatcctggaccccaccaagctgggacccaggatgcacatcttccagaatggctccctggtgatccatgacgtggcccctgaggactcaggccgctacacctgcattgcaggcaacagctgcaacatcaagcacacggaggcccccctctatgtcgtggacaagcctgtgccggaggagtcggagggccctggcagccctcccccctacaagatgatccagacc

SEQ ID NO: 4214 - DNA, 504 bp, Homo Sapiens
ttccatgtgcaacaaacggagatgtcacagactgtatcaactggggagtcaatcatcttgagttgcagcgtacccgataccttaccaaatggacctgtcttgtggttcaagggaacagggccaaaccggaaattaatctacaatttcaaacaaggtaactttcccagagtaaaagagattggagacaccaccaagcctggcaacacagacttttccacccgcatccgtgaaatctctcttgctgatgctggcacctattactgcgtgaagttcataaaaggaagagctatcaaggagtaccaatcaggtcggggcactcaggtgtttgttactgagcagaatccaagacctcccaagaacagacctgcaggcagagcaggctccagggcccaccatgatgcccatacctgcctctcggccctgcctgagagaaacagcacaaactatttcgtccaaccctgctgctgcctccggctgctgggactcacaggcttgctgtcaaaa

SEQ ID NO: 4215 - DNA, 4797 bp, Homo Sapiens
gagccagagagatgtaacttcaccctggcggagtccaaggcctccagccattctgtgtctatccagtggagaattttgggctcaccctgtaactttagcctcatctatagcagtgacaccctgggggccgcgttgtgccctacctttcggatagacaacaccacatacggatgtaaccttcaagatttacaagcaggaaccatctataacttcaggattatttctctggatgaagagagaacagtggtcttgcaaacagatcctttacctcctgctaggtttggagtcagtaaagagaagacgacttcaaccagcttgcatgtttggtggactccttcttccggaaaagtcacctcatatgaggtgcaattatttgatgaaaataaccaaaagatacagggggttcaaattcaagaaagtacttcatggaatgaatacacttttttcaatctcactgctggtagtaaatacaatattgccatcacagctgtttctggaggaaaacgttctttttcagtttataccaatggatcaacagtgccatctccagtgaaagatattggtatttccacaaaagccaattctctcctgatttcctggtcccatggttctgggaatgtggaacgataccggctgatgctaatggataaagggatcctagttcatggcggtgttgtggacaaacatgctacttcctatgcttttcacgggctgacccctggctacctctacaacctcactgttatgactgaggctgcagggctgcaaaactacaggtggaaactagtcaggacagcccccatggaagtctcaaatctgaaggtgacaaatgatggcagtttgacctctctaaaagtcaaatggcaaagacctcctggaaatgtggattcttacaatatcaccctgtctcacaaagggaccatcaaggaatccagagtattagcaccttggattactgaaactcactttaaagagttagtccccggtcgactttatcaagttactgtcagctgtgtctctggtgaactgtctgctcagaagatggcagtgggcagaacatttccagacaaagttgcaaacctggaggcaaacaataatggcaggatgaggtctcttgtagtgagctggtcgccccctgctggagactgggagcagtatcggatcctactcttcaatgattctgtggtgctgctcaacatcactgtgggaaaggaagaaacacagtatgtcatggatgacacggggctcgtaccgggaagacagtatgaggtggaagtcattgttgagagtggaaatttgaagaattctgagcgttgccaaggcaggacagtccccctggctgtcctccagcttcgtgtcaaacatgccaatgaaacctcactgagtatcatgtggcagacccctgtagcagaatgggagaaatacatcatttccctagctgacagagacctcttactgatccacaagtcactctccaaagatgccaaagaattcacttttactgacctggtgcctggacgaaaatacatggctacagtcaccagtattagtggagacttaaaaaattcctcttcagtaaaaggaagaacagtgcctgcccaagtgactgacttgcatgtggccaaccaaggaatgaccagtagtctgtttactaactggacccaggcacaaggagacgtagaattttaccaagtcttactgatccatgaaaatgtggtcattaaaaatgaaagcatctccagtgagaccagcagatacagcttccactctctcaagtccggcagcctgtactccgtggtggtaacaacagtgagtggagggatctcttcccgacaagtggttgtggagggaagaacagtcccttccagtgtgagtggagtaacggtgaacaattccggtcgtaatgactacctcagcgtttcctggctgctggcgcccggagatgtggataactatgaggtaacattgtctcatgacggcaaggtggttcagtcccttgtcattgccaagtctgtcagagaatgttccttcagctccctcaccccaggccgcctctacaccgtgaccataactacaaggagtggcaagtatgaaaatcactccttcagccaagagcggacagtgcctgacaaagtccagggagtcagtgttagcaactcagccaggagtgactatttaagggtatcctgggtgcatgccactggagactttgatcactatgaagtcaccattaaaaacaaaaacaacttcattcaaactaaaagcattcccaagtcagaaaacgaatgtgtatttgttcagctagtccctggacggttgtacagtgtcactgttactacaaaaagtggacaatatgaagccaatgaacaagggaatgggagaacaattccagagcctgttaaggatctaacattgcgcaacaggagcactgaggacttgcatgtgacttggtcaggagctaatggggatgtcgaccaatatgagatccagctgctcttcaatgacatgaaagtatttcctccttttcaccttgtaaataccgcaaccgagtatcgatttacttccctaacaccaggccgccaatacaaaattcttgtcttgacgattagcggggatgtacagcagtcagccttcattgagggcttcacagttcctagtgctgtcaaaaatattcacatttctcccaatggagcaacagatagcctgacggtgaactggactcctggtgggggagacgttgattcctacacggtgtcggcattcaggcacagtcaaaaggttgactctcagactattcccaagcacgtctttgagcacacgttccacagactggaggccggggagcagtaccagatcatgattgcctcagtcagcgggtccctgaagaatcagataaatgtggttgggcggacagttccagcatctgtccaaggagtaattgcagacaatgcatacagcagttattccttaatagtaagttggcaaaaagctgctggtgtggcagaaagatatgatatcctgcttctaactgaaaatggaatccttctgcgcaacacatcagagccagccaccactaagcaacacaaatttgaagatctaacaccaggcaagaaatacaagatacagatcctaactgtcagtggaggcctctttagcaaggaagcccagactgaaggccgaacagtcccagcagctgtcaccgacctgaggatcacagagaactccaccaggcacctgtccttccgctggaccgcctcagagggggagctcagctggtacaacatctttttgtacaacccagatgggaatctccaggagagagctcaagttgacccactagtccagagcttctctttccagaacttgctacaaggcagaatgtacaagatggtgattgtaactcacagtggggagctgtctaatgagtctttcatatttggtagaacagtcccagcctctgtgagtcatctcagggggtccaatcggaacacgacagacagcctttggttcaactggagtccagcctctggggactttgacttttatgagctgattctctataatcccaatggcacaaagaaggaaaactggaaagacaaggacctgacggagtggcggtttcaaggccttgttcctggaaggaagtacgtgctgtgggtggtaactcacagtggagatctcagcaataaagtcacagcggagagcagaacagctccaagtcctcccagtcttatgtcatttgctgacattgcaaacacatccttggccatcacgtggaaagggcccccagactggacagactacaacgactttgagctgcagtggttgcccagagatgcacttactgtcttcaacccctacaacaacagaaaatcagaaggacgcattgtgtatggtcttcgtccagggagatcctatcaattcaacgtcaagactgtcagtggtgattcctggaaaacttacagcaaaccaatttttggatctgtgaggacaaagcctgacaagatacaaaacctgcattgccggcctcagaactccacggccattgcctgttcttggatccctcctgattctgactttgatggttatagtattgaatgccggaaaatggacacccaagaagttgagttttccagaaagctggagaaagaaaaatctctgctcaacatcatgatgctagtgccccataagaggtacctggtgtccatcaaagtgcagtcggccggcatgaccagcgaggtggttgaagacagcactatcacaatgatagaccgcccccctcctccacccccacacattcgtgtgaatgaaaaggatgtgctaattagcaagtcttccatcaactttactgtcaactgcagctggttcagcgacaccaatggagctgtgaaatacttcacagtggtggtgagagaggctgatggcagtgatgagctgaagccagaacagcagcaccctctcccttcctacctggagtacaggcacaatgcctccattcgggtgtatcagactaattattttgccagcaaatgtgccgaaaatcctaacagcaactccaagagttttaacattaagcttggagcagagatggagagcctaggtggaaaatgcgatcccactcagcaaaaattctgtgatggaccactgaagccacacactgcctacagaatcagcattcgagcttttacacagctctttgatgaggacctgaaggaattcacaaagccactctattcagacacatttttttctttacccatcactactgaatcagagcccttgtttggagctattgaa

SEQ ID NO: 4216 - DNA, 1656 bp, Homo Sapiens
cagtcaccgacacctagccccacaggactaactacagcaaagatgccctctgtacccctatcaagtgaccccttgcctacacacacaaccgctttttctccggcctcaacttttgaaagagagaacgattttagcgaaaccacaacatccctttcaccggacaatacttccactcaagtgtcccccgacagtctagataatgcctctgcctttaacacaaccggcgtatccagcgtgcagaccccgcacctgccgacccatgccgactcccagactccgtcagcaggtaccgatacacagacgttttctggctcagcggcgaatgcgaaacttaacccaacccctggctctaatgcgatcagcgacgtgccgggggaacgttctacagccagcacttttccaactgacccggtgtccccacttacgaccacactttcattggcacaccacagcagtgccgccctgcctgcaaggacctcaaacaccacgattaccgcaaatacttccgacgcgtatctaaacgctagcgagacaacgaccttgagtccatccggctctgccgtgattagtactacaactattgctactactcctagtaaaccaacgtgcgatgaaaagtatgcgaatatcacagtggattatttgtataataaagagacaaagttattcaccgccaaattgaatgtcaatgagaacgtagagtgcggtaacaatacatgcacgaacaatgaagtccataacttgactgagtgcaagaacgcatccgtaagcatttcccacaactcttgtactgctcccgataagaccttgatactagacgtacccccaggggtagaaaaatttcaattgcacgactgtacgcaagttgagaaagccgatacgacaatctgtttaaaatggaaaaatatagaaacctttacctgtgacacacagaatatcacatataggtttcagtgtgggaacatgatcttcgacaacaaggaaattaagctggagaaccttgaaccagagcacgagtacaagtgcgacagcgaaattctgtataacaaccacaaattcacaaacgcatccaagattatcaaaacagacttcggatctcccggtgaaccacagattatcttctgtcgttctgaggccgcgcaccagggcgtcattacatggaatccgccgcagcgtagttttcataattttaccctatgctatatcaaagaaacggagaaagactgtctgaatcttgataaaaatctaatcaaatacgacctacaaaatttaaaaccatatacgaagtatgtgctatcacttcatgcgtacattatagcaaaagtgcaaagaaacggtagtgctgcgatgtgtcacttcaccacaaagtccgcgccaccgtcacaggtctggaacatgacagtctctatgacgtccgataacagcatgcatgtcaagtgtagaccaccacgtgacagaaacgggcctcacgaacgttaccacttggaagtagaagctgggaacacattggtcagaaacgagtcacacaagaattgtgattttagggtgaaagacttgcagtattccactgattatactttcaaggcatattttcataatggggattacccaggggagccgttcatattgcaccattctacaagctacaattctaag

SEQ ID NO: 4217 - DNA, 2502 bp, Homo Sapiens
gagacacctccaaggtttacacgaacacccgttgatcagacaggggtctctggcggagttgcctctttcatctgccaagctacgggagacccaagacctaaaattgtctggaacaaaaaaggaaagaaagtcagcaatcagagatttgaggtaatagagtttgacgatgggtctggatcagttctcagaatacaacccttacggactccgagggatgaggccatttatgaatgtgtggcctcaaataatgtgggagaaataagtgtatccaccagactcacagttttgcgggaagatcaaattcccaggggcttccctaccattgacatgggcccacagttgaaggtggttgagcgtactcgcacggccaccatgctttgtgcagccagtggtaatccggatccagaaatcacttggtttaaagatttcttacctgtggacacaagcaacaacaatggtcgtattaagcagttacgatcagaatctattggtggtacaccaataagaggagcccttcagattgagcagagtgaagagtctgaccaaggaaaatatgagtgtgttgccaccaacagcgcgggcactcgctattccgctcctgccaatttatatgtcagagagctgcgagaagttcgccgtgtcccaccaagattctctatcccacccactaatcatgaaatcatgccaggcggaagcgttaatatcacctgtgtggccgtggggtcaccaatgccttatgtaaagtggatgttgggggcagaagatctgacacctgaagatgatatgccaataggaagaaatgtgctagaactgaatgatgtaagacagtcagcaaattacacctgtgttgctatgtcaacactgggtgtcattgaagcaatagcacagatcactgtcaaagccttacccaaacctccaggaactcctgtagtgaccgagagcacagctacaagcatcacactgacgtgggactctgggaaccctgagcctgtttcttattacataattcagcataaacctaaaaactctgaggaactttacaaagaaattgatggggtggcgaccacacgctacagtgtcgctggactaagtccctactcggattatgaattcagggttgttgctgtcaataacattgggcgggggcctcccagcgaacctgtgctaacacaaacctcagagcaagcaccatccagtgccccgagggatgtccaggcacgaatgttgagttcgaccaccattttggtacagtggaaggaacctgaagagccaaatggacagatccaaggatatagagtttattatacaatggatcccactcaacatgtcaacaactggatgaaacacaatgtagctgacagccaaatcactactattggcaacttagtgccccagaaaacatattctgtcaaagtcctggcttttacctcaattggagatggtcccctttcaagtgacatacaagtcatcactcagacaggagtaccagggcagccactaaacttcaaagcagaacctgagtctgaaacaagtattttgctctcttggacacctccacgttcagataccattgccaactatgaactggtctacaaagatggggagcatggagaggagcaacgaattaccattgagccagggacatcatataggctgcaaggactgaaaccaaacagcttatactatttccgtctggctgcacgctcccctcaaggcctgggtgcttctactgcagaaatatcagctagaaccatgcagtcaatgtttgcaaaaaattttcatgtcaaagcagtaatgaagacttccgtgttgctgtcttgggagattccagagaattataactccgccatgcctttcaaaattctttatgatgatgggaaaatggtagaagaagtggatggccgagccacacagaagttaattgtcaacctgaagcctgagaaatcatattcatttgtgctgacaaatcgtggaaacagtgctggtgggctgcagcacagggtcacggcaaagactgcaccagatgtattacgtaccaagcctgccttcattgggaagaccaacttggatggcatgattactgtgcaactgcctgaagtacctgcaaatgagaatataaaaggttactacataataattgtgcctttgaagaaatctcgcgggaaatttatcaagccatgggagagtccagatgaaatggaattagatgagctgcttaaggagatatctaggaagcgcagaagcatccgttatgggagagaagttgaattaaagccatatattgccgctcactttgatgtccttcccactgagttcaccctgggggatgacaagcattatggtggatttacaaacaagcaactccaaagtggtcaagaatatgtcttctttgtgttagcagtaatggaacatgcagagtctaagatgtatgcaaccagcccttactccgaccccgtggtgtcaatggatctggatccgcagccaatcacggatgaagaagaa

SEQ ID NO: 4218 - DNA, 3675 bp, Homo Sapiens
gacagcaaacctgtcttcattaaagtccctgaggaccagactgggctgtcaggaggggtagcctccttcgtgtgccaagctacaggagaacccaagccgcgcatcacatggatgaagaaggggaagaaagtcagctcccagcgcttcgaggtcattgagtttgatgatggggcagggtcagtgcttcggatccagccattgcgggtgcagcgagatgaagccatctatgagtgtacagctactaacagcctgggtgagatcaacactagtgccaagctctcagtgctcgaagaggaacagctgccccctgggttcccttccatcgacatggggcctcagctgaaggtggtggagaaggcacgcacagccaccatgctatgtgccgcaggcggaaatccagaccctgagatttcttggttcaaggacttccttcctgtagaccctgccacgagcaacggccgcatcaagcagctgcgttcaggtgccttgcagatagagagcagtgaggaatccgaccaaggcaagtacgagtgtgtggcgaccaactcggcaggcacacgttactcagcccctgcgaacctgtatgtgcgagtgcgccgcgtggctcctcgtttctccatccctcccagcagccaggaggtgatgccaggcggcagcgtgaacctgacatgcgtggcagtgggtgcacccatgccctacgtgaagtggatgatgggggccgaggagctcaccaaggaggatgagatgccagttggccgcaacgtcctggagctcagcaatgtcgtacgctctgccaactacacctgtgtggccatctcctcgctgggcatgatcgaggccacagcccaggtcacagtgaaagctcttccaaagcctccgattgatcttgtggtgacagagacaactgccaccagtgtcaccctcacctgggactctgggaactcggagcctgtaacctactatggcatccagtaccgcgcagcgggcacggagggcccctttcaggaggtggatggtgtggccaccacccgctacagcattggcggcctcagccctttctcggaatatgccttccgcgtgctggcggtgaacagcatcgggcgagggccgcccagcgaggcagtgcgggcacgcacgggagaacaggcgccctccagcccaccgcgccgcgtgcaggcacgcatgctgagcgccagcaccatgctggtgcagtgggagcctcccgaggagcccaacggcctggtgcggggataccgcgtctactatactccggactcccgccgccccccgaacgcctggcacaagcacaacaccgacgcggggctcctcacgaccgtgggcagcctgctgcctggcatcacctacagcctgcgcgtgcttgccttcaccgccgtgggcgatggccctcccagccccaccatccaggtcaagacgcagcagggagtgcctgcccagcccgcggacttccaggccgaggtggagtcggacaccaggatccagctctcgtggctgctgccccctcaggagcggatcatcatgtatgaactggtgtactgggcggcagaggacgaagaccaacagcacaaggtgaccttcgacccaacctcctcctacacactagaggacctgaagcctgacacactctaccgcttccagctggctgcacgctcggatatgggggtgggcgtcttcacccccaccattgaggcccgcacagcccagtccaccccctccgcccctccccagaaggtgatgtgtgtgagcatgggctccaccacggtccgggtaagttgggtcccgccgcctgccgacagccgcaacggcgttatcacccagtactccgtggcctacgaggcggtggacggcgaggaccgcgggcggcatgtggtggatggcatcagccgtgagcactccagctgggacctggtgggcctggagaagtggacggagtaccgggtgtgggtgcgggcacacacagacgtgggccccggccccgagagcagcccggtgctggtgcgcaccgatgaggacgtgcccagcgggcctccgcggaaggtggaggtggagccactgaactccactgctgtgcatgtctactggaagctgcctgtccccagcaagcagcatggccagatccgcggctaccaggtcacctacgtgcggctggagaatggcgagccccgtggactccccatcatccaagacgtcatgctagccgaggcccaggaaaccactatcagcggcctgaccccggagaccacctactccgttactgttgctgcctataccaccaagggggatggtgcccgcagcaagcccaaaattgtcactacaacaggtgcagtcccaggccggcccaccatgatgatcagcaccacggccatgaacactgcgctgctccagtggcacccacccaaggaactgcctggcgagctgctgggctaccggctgcagtactgccgggccgacgaggcgcggcccaacaccatagatttcggcaaggatgaccagcacttcacagtcaccggcctgcacaaggggaccacctacatcttccggcttgctgccaagaaccgggctggcttgggtgaggagttcgagaaggagatcaggacccccgaggacctgcccagcggcttcccccaaaacctgcatgtgacaggactgaccacgtctaccacagaactggcctgggacccgccagtgctggcggagaggaacgggcgcatcatcagctacaccgtggtgttccgagacatcaacagccaacaggagctgcagaacatcacgacagacacccgctttacccttactggcctcaagccagacaccacttacgacatcaaggtccgcgcatggaccagcaaaggctctggcccactcagccccagcatccagtcccggaccatgccggtggagcaagtgtttgccaagaacttccgggtggcggctgcaatgaagacgtctgtgctgctcagctgggaggttcccgactcctataagtcagctgtgccctttaagattctgtacaatgggcagagtgtggaggtggacgggcactcgatgcggaagctgatcgcagacctgcagcccaacacagagtactcgtttgtgctgatgaaccgtggcagcagcgcagggggcctgcagcacctggtgtccatccgcacagcccccgacctcctgcctcacaagccgctgcctgcctctgcctacatagaggacggccgcttcgatctctccatgccccatgtgcaagacccctcgcttgtcaggtggttctacattgttgtggtgcccattgaccgtgtgggcgggagcatgctgacgccaaggtggagcacacccgaggaactggagctggacgagcttctagaagccatcgagcaaggcggagaggagcagcggcggcggcggcggcaggcagaacgtctgaagccatatgtggctgctcaactggatgtgctcccggagacctttaccttgggggacaagaagaactaccggggcttctacaaccggcccctgtctccggacttgagctaccagtgctttgtgcttgcctccttgaaggaacccatggaccagaagcgctatgcctccagcccctactcggatgagatcgtggtccaggtgacaccagcccagcagcaggaggagccggagatgctgtgg

SEQ ID NO: 4219 - DNA, 2151 bp, Homo Sapiens
gtgctccattatgtcgtgtgcttccccgcgttgacagaaggctacgttggggccctgcacgagaatagacacggcagcgcagtgcagatccgcaggcgcaaggcttcaggcgacccgtactgggcctactctggtgcctatggtcctgagcactgggtcacgtctagtgtcagctgtgggggccgtcaccagtctcctattgacattttagaccagcatgcgcgtgttggggaagaataccaggaactgcaactcgatggcttcgacaatgagtcttctaacaaaacctggatgaaaaacacagggaaaacagtcgccatccttctgaaagacgactattttgtcagtggagctggtctacctggcagattcaaagctgagaaggtggaatttcactggggccacagcaatggctcagcgggctctgaacacagcatcaatggcaggaggtttcctgttgagatgcagattttcttttacaatccagatgactttgacagctttcaaaccgcaatttctgagaacagaataatcggagccatggccatattttttcaagtcagtccgagggacaattctgcactggatcctattatccacgggttgaagggtgtcgtacatcatgagaaggagacctttctggatcctttcgtcctccgggacctcctgcctgcatccctgggcagctattatcggtacacaggttccttgaccacaccaccgtgtagcgaaatagtggagtggatagtcttccggagacccgtccccatctcttaccatcagcttgaggctttttattccatcttcaccacggagcagcaagaccatgtcaagtcggtggagtatctgagaaataactttcgaccacagcagcgtctgcatgacagggtggtgtccaagtccgccgtccgtgactcctggaaccacgacatgacagacttcttagaaaacccactggggacagaagcctctaaagtttgcagctctccacccatccacatgaaggtgcagcctctgaaccagacggcactgcaggtgtcctggagccagccggagactatctaccacccacccatcatgaactacatgatctcctacagctggaccaagaatgaggacgagaaggagaagacgtttacaaaggacagcgacaaagacttgaaagccaccattagccatgtctcacccgatagcctttacctgttccgagtccaggccgtgtgtcggaacgacatgcgcagcgactttagccagacgatgctgtttcaagctaataccactcgaatattccaagggaccagaatagtgaaaacaggagtgcccacagcgtctcctgcctcttcagccgacatggcccccatcagctcggggtcttctacctggacgtcctctggcatcccattctcatttgtttccatggcaactgggatgggcccctcctccagtggcagccaggccacagtggcctcggtggtcaccagcacgctgctcgccggcctggggttcggcggtggtggcatctcctctttccccagcactgtgtggcccacgcgcctcccgacggccgcctcagccagcaagcaggcggctaggccagtcctagccaccacagaggccttggcttctccagggcccgatggtgattcgtcaccaaccaaggacggcgagggcaccgaggaaggagagaaggatgagaaaagcgagagtgaggatggggagcgggagcacgaggaggatggagagaaggactccgaaaagaaggagaagagtggggtgacccacgctgccgaggagcggaatcagacggagcccagccccacaccctcgtctcctaacaggactgccgagggagggcatcagactatacctgggcatgagcaggatcacactgccgtccccacagaccagacgggcggaaggagggatgccggcccaggcctggaccccgacatggtcacctccacccaagtgccccccaccgccacagaggagcagtatgcagggagtgatcccaagaggcccgaaatgccatctaaaaagcctatgtcccgcggggaccgattttctgaagacagcagatttatcactgttaatccagcggaaaaaaacacctctggaatgataagccgccctgctccagggaggatggag

SEQ ID NO: 4220 - DNA, 2181 bp, Homo Sapiens
cctgcccccaacccagggaggaacctgacagtggagactcagaccaccagctccatctccctgagctgggaggtccccgatggcctagactcacagaactccaactactgggttcagtgtactggagacggcggcacaacagagactcgaaacacaacagccaccaacgtcaccgtggatggccttggacccgggtcattgtatacgtgttctgtgtgggtggagaaagacggagtaaatagctctgtggggactgtcactactgccacagctcccaacccagtgaggaacctgagagtggaggctcagaccaacagctccatcgccctgacctgggaggtccccgacggcccagacccacagaactccacctacggggttgagtacactggagatggtggcagagcagggactcgaagcacagcacacaccaacatcaccgtggatggacttgaacccgggtgtttgtatgcgttttccatgtgggtgggaaagaatggaatcaacagctcccgggagactcgaaatgccaccacagctcacaacccagtgaggaacctgagagtggaggctcagaccaccagctccatctccctgagctgggaggtccccgatggcacagacccacagaactccacctactgcgttcagtgcactggagatggtggcagaacagagactcgaaacacaacagacaccagagtcaccgtggatggccttggacccgggtcattgtatacgtgttctgtgtgggtggagaaagacggagtaaatagctctgtggagattgtcactagtgccacagctcccaacccagtgagaaacctgacagtggaggctcagaccaacagctccatcgccctgacctgggaggtccccgatggcccagacccacagaactccacctacggggttgagtacactggagatggtggcagagcagggactcgaagcacagcatacaccaacatcaccgtggatagacttgaacccgggtgtttgtatgtgttttccgtgtgggtggggaagaatggaatcaacagctcccgggagactcgaaatgccaccacagcccccaacccagtgagaaacctccatatggagactcagaccaacagctccatcgccctatgctgggaagtccccgatggcccataccctcaggactacacctactgggtagagtacactggagacggtggtggcacagagacccgaaacacaacaaataccagtgtgacagctgagagacttgagcccggaaccttgtacacattctctgtatgggcagaaaaaaatggagcacgtggctccaggcagaatgtcagcatctccacagtccccaacgcagtgacaagcctcagcaagcaggactggaccaacagcaccattgctttgcgctggacagctccccagggcccaggccagtcttcctacagctactgggtctcatgggtcagggaaggcatgactgaccccaggacccaaagcacctcaggtactgacatcaccctaaaggaactggaagctggcagcctgtaccacctcaccgtctgggccgagaggaatgaggtcagaggctataacagcaccctcactgcagccactgctcccaatgaggtcacagatctccagaatgaaactcagactaagaactcagtcatgctgtggtggaaggcccctggagacccccactctcagttgtacgtatactgggtccagtgggccagcaagggacatccccggagggggcaagatccccaagcgaattgggtcaaccagaccagcaggaccaatgagacgtggtacaaagtggaggccctggaacccgggacgctgtacaatttcaccgtgtgggcagagaggaatgacgtagccagttccacgcagagcctctgtgcgtccacatacccagacacagtcaccatcacttcctgtgtcagcacctcagcgggctatggagtcaacttgatctggtcctgcccccagggaggctacgaggcctttgagttggaggtgggaggacagcggggctcccaggacagatcttcatgtggggaggctgtgtctgtgttgggtctcgggccggctcggtcctacccagccaccatcacgaccatctgggacggaatgaaggtcgtgtctcactctgtggtctgccacaccgagagtgcaggggtc

SEQ ID NO: 4221 - DNA, 1512 bp, Homo Sapiens
gcaggtggcacccctagtccaattcctgacccttcagtagcaactgttgccacaggggaaaatggcataacgcagatcagcagtacagcagaatcctttcataaacagaatggaactggaacacctcaggtggaaacaaacaccagtgaggatggtgaaagctctggagccaacgatagtttaagaacacctgaacaaggatctaatgggactgatggggcatctcaaaaaactcccagtagcactgggcccagtcctgtgtttgacattaaagctgtttccatcagtccaaccaatgtgatcttaacttggaaaagtaatgacacagctgcttctgagtacaagtatgtagtaaagcataagatggaaaatgagaagacaattactgttgtgcatcaaccatggtgtaacatcacaggcttacgtccagcgacttcatatgtattctccatcactccaggaataggcaatgagacttggggagatcccagagtcataaaagtcatcacagagccgatcccagtttctgatctccgtgttgccctcacgggtgtgaggaaggctgctctctcctggagcaatggcaatggcaccgcctcctgccgggttcttcttgaaagcattggaagccatgaggagttgactcaagactcaagacttcaggtcaatatctcgggcctgaagccaggggttcaatacaacatcaacccgtatcttctacaatcaaataagacaaagggagaccccttgggcacagaaggtggcttggatgccagcaatacagagagaagccgggcagggagccccaccgcccctgtgcatgatgagtccctcgtgggacctgtggacccatcctccggccagcagtcccgagacacggaagtcctgcttgtcgggttagagcctggcacccgatacaatgccaccgtttattcccaagcagcgaatggcacagaaggacagccccaggccatagagttcaggacaaatgctattcaggtttttgacgtcaccgctgtgaacatcagtgccacaagcctgaccctgatctggaaagtcagcgataacgagtcgtcatctaactatacctacaagatacatgtggcgggggagacagattcttccaatctcaacgtcagtgagcctcgcgctgtcatccccggactccgctccagcaccttctacaacatcacagtgtgtcctgtcctaggtgacatcgagggcacgccgggcttcctccaagtgcacaccccccctgttccagtttctgacttccgagtgacagtggtcagcacgacggagatcggcttagcatggagcagccatgatgcagaatcatttcagatgcatatcacacaggagggagctggcaattctcgggtagaaataaccaccaaccaaagtattatcattggtggcttgttccctggaaccaagtattgctttgaaatagttccaaaaggaccaaatgggactgaaggggcatctcggacagtttgcaatagaactgga

SEQ ID NO: 4222 - DNA, 2181 bp, Homo Sapiens
gcccaaggccagttctccgcaggtggctgtacttttgatgatggtccaggggcctgtgattaccaccaggatctgtatgatgactttgaatgggtgcatgttagtgctcaagagcctcattatctaccacccgagatgccccaaggttcctatatgatagtggactcttcagatcacgaccctggagaaaaagccagacttcagctgcctacaatgaaggagaacgacactcactgcattgatttcagttacctattatatagccagaaaggactgaatcctggcactttgaacatattagttagggtgaataaaggacctcttgccaatccaatttggaatgtgactggattcacgggtagagattggcttcgggctgagctagcagtgagcaccttttggcccaatgaatatcaggtaatatttgaagctgaagtctcaggagggagaagtggttatattgccattgatgacatccaagtactgagttatccttgtgataaatctcctcatttcctccgtctaggggatgtagaggtgaatgcagggcaaaacgctacatttcagtgcattgccacagggagagatgctgtgcataacaagttatggctccagagacgaaatggagaagatataccagtagcccagactaagaacatcaatcatagaaggtttgccgcttccttcagattgcaagaagtgacaaaaactgaccaggatttgtatcgctgtgtaactcagtcagaacgaggttccggtgtgtccaattttgctcaacttattgtgagagaaccgccaagacccattgctcctcctcagcttcttggtgttgggcctacatatttgctgatccaactaaatgccaactcgatcattggcgatggtcctatcatcctgaaagaagtagagtaccgaatgacatcaggatcctggacagaaacccatgcagtcaatgctccaacttacaaattatggcatttagatccagataccgaatatgagatccgagttctacttacaagacctggtgaaggtggaacggggctcccaggacctccactaatcaccagaacaaaatgtgcagaacctatgagaaccccaaagacattaaagattgctgaaatacaggcaagacggattgctgtggactgggaatccttgggttacaacattacgcgttgccacacttttaatgtcactatctgctaccattacttccgtggtcacaacgagagcaaggcagactgtttggacatggaccccaaagcccctcagcatgttgtgaaccatctgccaccttatacaaatgtcagcctcaagatgatcctaaccaatccagagggaaggaaggagagtgaagagacaattattcaaactgatgaagatgtgcctggtcccgtaccagtaaaatctcttcaaggaacatcctttgaaaataagatcttcttgaactggaaagaacctttggatccaaatggaatcatcactcaatatgagatcagctatagcagtataagatcatttgatcctgcagttccagtggctggacctccccagactgtatcaaatttatggaacagtacacaccatgtctttatgcatctccaccctggaaccacgtaccagtttttcataagagccagcacggtcaaaggctttggtccagccacagccatcaatgtcaccaccaatatctcagctccaactttacctgactatgaaggagttgatgcctctctcaatgaaactgccaccacaataactgtattgttgagaccagcacaagccaaaggtgctcctatcagtgcttatcagattgttgtggaagaactgcacccacaccgaaccaagagagaagccggagccatggaatgctaccaggttcctgtcacataccaaaatgccatgagtgggggtgcaccgtattactttgctgcagaactacccccgggaaacctacctgagcctgccccgttcactgtgggtgacaatcggacctaccaaggcttttggaaccctcctttggctccgcgcaaaggatacaacatctatttccaggcgatgagcagtgtggagaaggaaactaaaacccagtgcgtacgcattgctacaaaagcagcagcaacagaagaaccagaagtgatcccagatcccgccaagcagacagacagagtggtgaaa

SEQ ID NO: 4223 - DNA, 1536 bp, Homo Sapiens
gttagtgcccacggctgtctatttgaccgcaggctctgctctcacctggaagtctgtattcaggatggcttgtttgggcagtgccaggtgggagtggggcaggcccggccccttttgcaagtcacctccccagttctccaacgcttacaaggtgtgctccgacaactcatgtcccaaggattgtcctggcacgatgacctcacccagtatgtgatctctcaggagatggagcgcatccccaggcttcgccccccagagccccgtccaagggacaggtctggcttggcacccaagagacctggtcctgctggagagctgcttttacaggacatccccactggctccgcccctgctgcccagcatcggcttccacaaccaccagtgggcaaaggtggagctggggccagctcctctctgtcccctctgcaggctgagctgctcccgcctctcttggagcacctgctgctgcccccacagcctccccacccttcactgagttacgaacctgccttgctgcagccctacctgttccaccagtttggctcccgtgatggctccagggtctcagagggctccccagggatggtcagtgtcggccccctgcccaaggctgaagcccctgccctcttcagcagaactgcctccaagggcatatttggggaccaccctggccactcctacggggaccttccagggccttcacctgcccagctttttcaagactctgggctgctctatctggcccaggagttgccagcacccagcagggccagggtgccaaggctgccagagcaagggagcagcagccgggcagaggactccccagagggctatgagaaggaaggactaggggatcgtggagagaagcctgcttccccagctgtgcagccagatgcggctctgcagaggctggccgctgtgctggcgggctatggggtagagctgcgtcagctgacccctgagcagctctccacactcctgaccctgctgcagctactgcccaagggtgcaggaagaaatccgggaggggttgtaaatgttggagctgatatcaagaaaacaatggaggggccggtggagggcagagacacagcagagcttccagcccgcacatcccccatgcctggacaccccactgccagccctacctccagtgaagtccagcaggtgccaagccctgtctcctctgagcctcccaaagctgccagaccccctgtgacacctgtcctgctagagaagaaaagcccactgggccagagccagcccacggtggcaggacagccctcagcccgcccagcagcagaggaatatggctacatcgtcactgatcagaatgtggtgggaccagccctcaccttccgcatccggcacaatgagcagaacctgtctttggctgatgtgacccaacaagcagggctggtgaagtctgaactggaagcacagacagggctccaaatcttgcagacaggagtgggacagagggaggaggcagctgcagtccttccccaaactgcgcacagcacctcacccatgcgc

SEQ ID NO: 4224 - DNA, 2379 bp, Homo Sapiens
ttccatgtaactgtccaagatgataataacatcgttgtctcattagaagcttcagacgtcatcagtccagcatctgtgtatgttgtgaagataactggtgaatccaaaaattatttcttcgaatttgaggaattcaacagcactttgcctcctcctgttattttcaaggccagttatcatggcctttattatataatcactctggtagtggtaaatggaaatgtggtgaccaagccatccagatcaatcactgtgttaacaaaacctctacctgtaaccagtgtttccatatatgactataaaccttctcctgaaacaggagtcctgtttgaaatacattatccagaaaaatataacgttttcacaagagtgaacattagctactgggaaggtaaagacttccggacaatgctatataaagatttctttaagggaaaaacagtatttaatcactggctgccaggaatgtgttatagtaatatcacctttcagctggtatctgaggcaacttttaataaaagtacccttgttgagtacagtggtgtcagtcacgaacccaaacagcacagaactgccccttatccacctcaaaatatttccgttcgtatcgtaaacttgaacaaaaacaactgggaagaacagagtggcaatttcccagaagaatccttcatgagatcacaagatacaataggaaaagaaaaactcttccattttacagaagaaacccctgaaattccctcgggcaacatttcttccggttggcctgattttaatagcagtgactatgaaactacgtctcagccatattggtgggacagtgcatctgcagctcctgaaagtgaagatgaatttgtcagcgtacttcccatggaatacgaaaataacagtacactcagtgagacagagaagtcaacatcaggctctttctcctttttccctgtgcaaatgatattgacctggttaccacccaaaccacccactgcttttgatgggttccatatccatattgaacgagaagagaactttactgaatatttgatggtggatgaagaagcacatgaatttgttgcagaactgaaggaacctgggaaatataagttatctgtgacaacctttagttcctcaggatcttgtgaaactcgaaaaagtcagtcagcaaaatcactcagcttttatatcagtccttcaggagagtggattgaagaactgaccgagaagccgcagcacgtgagtgtccacgttttaagctcaaccactgccttgatgtcctggacatcttcccaagagaactacaacagcaccattgtgtctgtggtgtcgctgacctgccagaaacaaaaggagagccagaggcttgaaaagcagtactgcactcaggtgaactcaagcaaacctattattgaaaatctggttcctggtgcccagtaccaggttgtaatatacctaaggaaaggccctttgattggaccaccttcagatcctgtgacatttgctattgttcccacaggaataaaggatttaatgctctatcctttgggtcctacggccgtggttctgagctggaccagaccttatttaggcgtgttcagaaaatacgtggttgaaatgttttatttcaaccctgctacaatgacatcagagtggaccacctactatgaaatagcagcaactgtttccttaactgcatccgtgagaatagctaatctgctgccagcatggtactacaacttccgggttaccatggtgacgtggggagatccagaattgagctgctgtgacagctctaccatcagcttcataacagccccagtggctccggaaatcacttctgtggaatatttcaacagtctgttatatatcagttggacatatggggatgatacaacggacttgtcccattctagaatgcttcactggatggtggttgcagaaggaaaaaagaaaattaaaaagagtgtaacacgcaatgtcatgactgcaattctcagcttgcctccaggcgacatctataacctctcagtaactgcttgtactgaaagaggaagtaatacctccatgctccgccttgtcaagctagaaccagctccacccaaatcactcttcgcagtgaacaaaacccagacttcagtgactttgctgtgggtggaagagggagtagctgatttctttgaagttttctgtcaacaagttggctccagtcagaaaaccaaacttcaggaaccagttgctgtttcttcccatgtcgtgaccatctccagccttcttcctgccactgcctacaattgtagtgtcaccagctttagccatgacagccccagtgtccctacgttcatagccgtctcaacaatggttacagagatgaatcccaatgtggtagtg

SEQ ID NO: 4225 - DNA, 618 bp, Homo Sapiens
tttagcggtaataacgatcatttcctagctatcaatcagaagaagtctgggaagccagtgtttatctataaacacagtcaggatattgagaagtccttggatattgctccgcaaaagatatataggcactcataccactctagctctgaagctcaggtgtccaagagacaccagatagtgaactctgccttccctaggccggcatacgacccaagccttaaccttctggcaatggatgggcaggacttggaggtggaaaacctacctattcctgctgcaaacgtgattgtggttacgctacagatggatgttaataaactgaatatcacgctgctaaggatctttcgtcagggggtggcagccgcactgggcttactgcctcagcaggtacatattaatcgtctgatcggcaagaaaaactctatagagctatttgtgagtccgatcaatagaaaaactggcatctccgatgccctgcctagtgaagaagttcttaggtcacttaacataaatgttttacatcaatctctatcacaatttggtataactgaggtatctccagaaaagaatgtgctgcaaggtcaacacgaagccgacaagatatggtctaaagagggt

SEQ ID NO: 4226 - DNA, 2466 bp, Homo Sapiens
gaagagccccccaggtttatcaaagaacccaaggaccagatcggcgtgtcggggggtgtggcctctttcgtgtgtcaggccacgggtgaccccaagccacgagtgacctggaacaagaagggcaagaaggtcaactctcagcgctttgagacgattgagtttgatgagagtgcaggggcagtgctgaggatccagccgctgaggacaccgcgggatgaaaacgtgtacgagtgtgtggcccagaactcggttggggagatcacagtccatgccaagcttactgtcctccgagaggaccagctgccctctggcttccccaacatcgacatgggcccacagttgaaggtggtggagcggacacggacagccaccatgctctgtgcagccagcggcaaccctgaccctgagatcacctggttcaaggacttcctgcctgtggatcctagtgccagcaatggacgcatcaaacagctgcgatcaggagccctgcagattgaaagcagtgaggaaaccgaccagggcaaatatgagtgtgtggccaccaacagcgccggcgtgcgctactcctcacctgccaacctctacgtgcgagtccgccgcgtggccccgcgcttctccatcctgcccatgagccacgagatcatgccagggggcaacgtgaacatcacctgcgtggccgtgggctcgcccatgccatacgtgaagtggatgcagggggccgaggacctgacccccgaggatgacatgcccgtgggtcggaacgtgctggaactcacagatgtcaaggactcggccaactacacctgcgtggccatgtccagcctgggcgtcattgaggcggttgctcagatcacggtgaaatctctccccaaagctcccgggactcccatggtgactgagaacacagccaccagcatcaccatcacgtgggactcgggcaacccagatcctgtgtcctattacgtcatcgaatataaatccaagagccaagacgggccgtatcagattaaagaggacatcaccaccacacgttacagcatcggcggcctgagccccaactcggagtacgagatctgggtgtcggccgtcaactccatcggccaggggccccccagcgagtccgtggtcacccgcacaggcgagcaggccccggccagcgcgccgcggaacgtgcaagcccggatgctcagcgcgaccaccatgattgtgcagtgggaggagccggtggagcccaacggcctgatccgcggctaccgcgtctactacaccatggaaccggagcaccccgtgggcaactggcagaagcacaacgtggacgacagcctgctgaccaccgtgggcagcctgctggaggacgagacctacaccgtgcgggtgctcgccttcacctccgtcggcgacgggcccctctcggaccccatccaggtcaagacgcagcagggagtgccgggccagcccatgaacctgcgggccgaggccaggtcggagaccagcatcacgctgtcctggagccccccgcggcaggagagtatcatcaagtacgagctcctcttccgggaaggcgaccatggccgggaggtgggaaggaccttcgacccgacgacttcctacgtggtggaggacctgaagcccaacacggagtacgccttccgcctggcggcccgctcgccgcagggcctgggcgccttcacccccgtggtgcggcagcgcacgctgcagtccatctcgcccaagaacttcaaggtgaaaatgatcatgaagacatcagttctgctcagctgggagttccctgacaactacaactcacccacaccctacaagatccagtacaatgggctcacactggatgtggatggccgtaccaccaagaagctcatcacgcacctcaagccccacaccttctacaactttgtgctgaccaatcgcggcagcagcctgggcggcctccagcagacggtcaccgcctggactgccttcaacctgctcaacggcaagcccagcgtcgcccccaagcctgatgctgacggcttcatcatggtgtatcttcctgacggccagagccccgtgcctgtccagagctatttcattgtgatggtgccactgcgcaagtctcgtggaggccaattcctgaccccgctgggtagcccagaggacatggatctggaagagctcatccaggacatctcacggctacagaggcgcagcctgcggcactcgcgtcagctggaggtgccccggccctatattgcagctcgcttctctgtgctgccacccacgttccatcccggcgaccagaagcagtatggcggcttcgataaccggggcctggagcccggccaccgctatgtcctcttcgtgcttgccgtgcttcagaagagcgagcctacctttgcagccagtcccttctcagaccccttccagctggataacccggacccccagcccatcgtggatggcgaggagggg

SEQ ID NO: 4227 - DNA, 1092 bp, Homo Sapiens
gagaactcggatgattatgatctcatgtatgtgaatttggacaacgaaatagacaatggactccatcccactgaggaccccacgccgtgcgactgcggtcaggagcactcggaatgggacaagctcttcatcatgctggagaactcgcagatgagagagcgcatgctgctgcaagccacggacgacgtcctgcggggcgagctgcagaggctgcgggaggagctgggccggctcgcggaaagcctggcgaggccgtgcgcgccgggggctcccgcagaggccaggctgaccagtgctctggacgagctgctgcaggcgacccgcgacgcgggccgcaggctggcgcgtatggagggcgcggaggcgcagcgcccagaggaggcggggcgcgccctggccgcggtgctagaggagctgcggcagacgcgagccgacctgcacgcggtgcagggctgggctgcccggagctggctgccggcaggttgtgaaacagctattttattcccaatgcgttccaagaagatttttggaagcgtgcatccagtgagaccaatgaggcttgagtcttttagtgcctgcatttgggtcaaagccacagatgtattaaacaaaaccatcctgttttcctatggcacaaagaggaatccatatgaaatccagctgtatctcagctaccaatccatagtgtttgtggtgggtggagaggagaacaaactggttgctgaagccatggtttccctgggaaggtggacccacctgtgcggcacctggaattcagaggaagggctcacatccttgtgggtaaatggtgaactggcggctaccactgttgagatggccacaggtcacattgttcctgagggaggaatcctgcagattggccaagaaaagaatggctgctgtgtgggtggtggctttgatgaaacattagccttctctgggagactcacaggcttcaatatctgggatagtgttcttagcaatgaagagataagagagaccggaggagcagagtcttgtcacatccgggggaatattgttgggtggggagtcacagagatccagccacatggaggagctcagtatgtttca

SEQ ID NO: 4228 - DNA, 969 bp, Homo Sapiens
tggccacccccaggaaccggggacgtcgtcgtgcaggcgcccacccaggtgcccggcttcttgggcgactccgtgacgctgccctgctacctacaggtgcccaacatggaggtgacgcatgtgtcacagctgacttgggcgcggcatggtgaatctggcagcatggccgtcttccaccaaacgcagggccccagctattcggagtccaaacggctggaattcgtggcagccagactgggcgcggagctgcggaatgcctcgctgaggatgttcgggttgcgcgtagaggatgaaggcaactacacctgcctgttcgtcacgttcccgcagggcagcaggagcgtggatatctggctccgagtgcttgccaagccccagaacacagctgaggttcagaaggtccagctcactggagagccagtgcccatggcccgctgcgtctccacagggggtcgcccgccagcccaaatcacctggcactcagacctgggcgggatgcccaatacgagccaggtgccagggttcctgtctggcacagtcactgtcaccagcctctggatattggtgccctcaagccaggtggacggcaagaatgtgacctgcaaggtggagcacgagagctttgagaagcctcagctgctgactgtgaacctcaccgtgtactaccccccagaggtatccatctctggctatgataacaactggtaccttggccagaatgaggccaccctgacctgcgatgctcgcagcaacccagagcccacaggctataattggagcacgaccatgggtcccctgccaccctttgctgtggcccagggcgcccagctcctgatccgtcctgtggacaaaccaatcaacacaactttaatctgcaacgtcaccaatgccctaggagctcgccaggcagaactgaccgtccaggtcaaagagggacctcccagtgagcactcaggcatgtcccgtaac

SEQ ID NO: 4229 - DNA, 975 bp, Homo Sapiens
caggtggtccaggtgaacgactccatgtatggcttcatcggcacagacgtggttctgcactgcagctttgccaacccgcttcccagcgtgaagatcacccaggtcacatggcagaagtccaccaatggctccaagcagaacgtggccatctacaacccatccatgggcgtgtccgtgctggctccctaccgcgagcgtgtggaattcctgcggccctccttcaccgatggcactatccgcctctcccgcctggagctggaggatgagggtgtctacatctgcgagtttgctaccttccctacgggcaatcgagaaagccagctcaatctcacggtgatggccaaacccaccaattggatagagggtacccaggcagtgcttcgagccaagaaggggcaggatgacaaggtcctggtggccacctgcacctcagccaatgggaagcctcccagtgtggtatcctgggaaactcggttaaaaggtgaggcagagtaccaggagatccggaaccccaatggcacagtgacggtcatcagccgctaccgcctggtgcccagcagggaagcccaccagcagtccttggcctgcatcgtcaactaccacatggaccgcttcaaggaaagcctcactctcaacgtgcagtatgagcctgaggtaaccattgaggggtttgatggcaactggtacctgcagcggatggacgtgaagctcacctgcaaagctgatgctaaccccccagccactgagtaccactggaccacgctaaatggctctctccccaagggtgtggaggcccagaacagaaccctcttcttcaagggacccatcaactacagcctggcagggacctacatctgtgaggccaccaaccccatcggtacacgctcaggccaggtggaggtcaatatcacagaattcccctacaccccgtctcctcccgaacatgggcggcgcgccgggccggtgcccacggcc

SEQ ID NO: 4230 - DNA, 987 bp, Homo Sapiens
caggatgtgcgagttcaagtgctacccgaggtgcgaggccagctcgggggcaccgtggagctgccgtgccacctgctgccacctgttcctggactgtacatctccctggtgacctggcagcgcccagatgcacctgcgaaccaccagaatgtggccgccttccaccctaagatgggtcccagcttccccagcccgaagcctggcagcgagcggctgtccttcgtctctgccaagcagagcactgggcaagacacagaggcagagctccaggacgccacgctggccctccacgggctcacggtggaggacgagggcaactacacttgcgagtttgccaccttccccaaggggtccgtccgagggatgacctggctcagagtcatagccaagcccaagaaccaagctgaggcccagaaggtcacgttcagccaggaccctacgacagtggccctctgcatctccaaagagggccgcccacctgcccggatctcctggctctcatccctggactgggaagccaaagagactcaggtgtcagggaccctggccggaactgtcactgtcaccagccgcttcaccttggtgccctcgggccgagcagatggtgtcacggtcacctgcaaagtggagcatgagagcttcgaggaaccagccctgatacctgtgaccctctctgtacgctaccctcctgaagtgtccatctccggctatgatgacaactggtacctcggccgtactgatgccaccctgagctgtgacgtccgcagcaacccagagcccacgggctatgactggagcacgacctcaggcaccttcccgacctccgcagtggcccagggctcccagctggtcatccacgcagtggacagtctgttcaataccaccttcgtctgcacagtcaccaatgccgtgggcatgggccgcgctgagcaggtcatctttgtccgagaaacccccagggcctcgccccgagatgtgggcccgctg

SEQ ID NO: 4231 - DNA, 927 bp, Homo Sapiens
ggaccaattattgtggagccacatgtcacagcagtatggggaaagaatgtttcattaaagtgtttaattgaagtaaatgaaaccataacacagatttcatgggagaagatacatggcaaaagttcacagactgttgcagttcaccatccccaatatggattctctgttcaaggagaatatcagggaagagtcttgtttaaaaattactcacttaatgatgcaacaattactctgcataacataggattctctgattctggaaaatacatctgcaaagctgttacattcccgcttggaaatgcccagtcctctacaactgtaactgtgttagttgaacccactgtgagcctgataaaagggccagattctttaattgatggaggaaatgaaacagtagcagccatttgcatcgcagccactggaaaacccgttgcacatattgactgggaaggtgatcttggtgaaatggaatccactacaacttcttttccaaatgaaacggcaacgattatcagccagtacaagctatttccaaccagatttgctagaggaaggcgaattacttgtgttgtaaaacatcaagccttggaaaaggacatccgatactctttcatattagacatacagtatgctcctgaagtttcggtaacaggatatgatggaaattggtttgtaggaagaaaaggtgttaatctcaaatgtaatgctgatgcaaatccaccacccttcaaatctgtgtggagcaggttggatggacaatggcctgatggtttattggcttcagacaatactcttcattttgtccatccattgactttcaattattctggtgtttatatctgtaaagtgaccaattcccttggtcaaagaagtgaccaaaaagtcatctacatttcagcctacaattcagtggcatccctcaactgc

SEQ ID NO: 4232 - DNA, 954 bp, Homo Sapiens
ggtgagctggagacctcagacgtggtaactgtggtgctgggccaggacgcaaaactgccctgcttctaccgaggggactccggcgagcaagtggggcaagtggcatgggctcgggtggacgcgggcgaaggcgcccaggaactagcgctactgcactccaaatacgggcttcatgtgagcccggcttacgagggccgcgtggagcagccgccgcccccacgcaaccccctggacggctcagtgctcctgcgcaacgcagtgcaggcggatgagggcgagtacgagtgccgggtcagcaccttccccgccggcagcttccaggcgcggctgcggctccgagtgctggtgcctcccctgccctcactgaatcctggtccagcactagaagagggccagggcctgaccctggcagcctcctgcacagctgagggcagcccagcccccagcgtgacctgggacacggaggtcaaaggcacaacgtccagccgttccttcaagcactcccgctctgctgccgtcacctcagagttccacttggtgcctagccgcagcatgaatgggcagccactgacttgtgtggtgtcccatcctggcctgctccaggaccaaaggatcacccacatcctccacgtgtccttccttgctgaggcctctgtgaggggccttgaagaccaaaatctgtggcacattggcagagaaggagctatgctcaagtgcctgagtgaagggcagccccctccctcatacaactggacacggctggatgggcctctgcccagtggggtacgagtggatggggacactttgggctttcccccactgaccactgagcacagcggcatctacgtctgccatgtcagcaatgagttctcctcaagggattctcaggtcactgtggatgttcttgacccccaggaagactctgggaagcaggtggacctagtgtcagcctcg

SEQ ID NO: 4233 - DNA, 3804 bp, Homo Sapiens
atgtctgaatcttatcggagaactacttttccagtaagattccgtgttgtctccgtggatgaaaattttcgccctcgaaatgaactgattccactgatataccttgagaacccaagaagaaatcgaattgcacaatggcagagtctcaagctagaagctggcatcaatcagttgtcctttcccctctcatcagagcccattcagggctcctacagggtggtggtacagacagaatcaggtggaaggatacagcaccccttcaccgtggaggaatttgtgcttcccaagtttgaggtcaaagttcaggtgccaaagataatcagtatcatggatgaaaaagtgaacataacagtctgtggagaatacacttatgggaagcctgtcccaggacttgcaactgtgagcctgtgtagaaaattatctcgtgttcttaattgtgacaagcaggaggtctgtgaggaattcagtcaacagcttaacagcaatggctgcatcacccaacaagtacacaccaaaatgctccagattacaaatacgggctttgaaatgaagcttagagtggaagccaggatcagagaagaggggacagacctggaagtcactgcaaacaggatcagtgaaatcacaaacattgtatccaaactcaaattcgtgaaagtggattcacactttagacaaggaatccccttttttgcacaggtgcttctggtggatggaaaaggtgtgcccatccccaataaactcttcttcatctctgtgaatgacgccaattattactccaatgcaaccaccaatgagcagggtcttgcacagttttcaatcaatactaccagtatctcggttaataaactttttgtccgggttttcactgtgcatcccaacttgtgttttcactattcatgggtagcagaagaccaccagggcgctcagcacactgcaaatcgtgttttctccttaagtggaagttacattcacctggagcctgtggctggtaccctgccctgtggccacacggagactatcacggcacactatacactgaatagacaggccatgggagagttatcggagctcagtttccattacctgatcatggctaagggagtcatcgtcagatctggaacccacactctgcctgtggagtcaggagacatgaaaggcagttttgccttatccttccctgtggagtcagacgttgcccccattgcacgaatgttcatctttgccattttaccagatggagaagttgttggagactctgaaaaatttgagattgaaaactgtctagccaacaaggtggatttgagcttcagcccagcacaaagtcccccagcctcacatgcccacctgcaagtagcagctgctccgcagtccctctgtgcccttcgtgctgtggaccaaagtgtgctgctcatgaagcctgaggctgagctctctgtgtcctcagtatataatctgctaactgtgaaggatctcaccaattttcctgacaatgtggaccagcaggaggaagaacaaggacactgtccccgtcctttcttcattcataatggagccatctatgttcccttatcaagtaatgaagcagatatttatagcttcctcaaggggatgggattgaaggtgttcactaactcaaaaatccgaaaaccaaagtcgtgttcagtcatcccttccgtgtctgcaggagcagtaggtcaaggatactatggagcaggtctaggagtagtagagagaccatatgttcctcaattaggcacatataatgtgatacccttaaataatgaacaaagttcagggccagtccctgaaacggtgcgaagctattttcctgagacttggatctgggagttggtggcagtgaactcatcaggtgtggctgaggtaggagtaacagtccctgacaccatcaccgagtggaaggcaggggccttctgcctgtctgaagatgctggacttggtatctcttccactgcctctctccgagccttccagcccttctttgtggagctcacaatgccttactctgtgattcgtggagaggtcttcacactcaaggccacggtcctaaactaccttcccaaatgcatccgggctgaaggtattgagcaagaaaagactttcagttccatgacctgtgcctcaggtgctaatgtgtctgagcagttgtccttgaagctcccatcaaatgtggtcaaagaatctgccagagcttctttctcagttctgggtgacatattaggttctgctatgcaaaatatacaaaatctcctccagatgccatatggctgtggagaacagaacatggtcctatttgctcctaacatctatgtcttgaactatctgaatgaaacccagcagctgacgcaggagatcaaggccaaggccgttggctatctcatcactggttaccagagacagctgaactacaaacaccaagatggctcctacagcacctttggggaacgatatggcaggaaccagggcaacacttggctcacagcttttgtactgaagactttcgcccaggctcgatcctacatcttcattgatgaagcacacattacccaatctctcacgtggctctcccagatgcagaaggacaatggctgtttcaggagctctgggtcactgctcaacaatgccataaagggaggtgtagaagatgaagcgaccctctccgcctatgttactattgcccttctggaaattcctctcccagtcactaaccctattgttcgcaatgccctgttctgcctggagtcagcctggaatgtagcaaaggaggggacccatgggagccatgtctacaccaaggcattgctggcctatgctttttccctactgggaaagcaaaatcagaatagagaaatactgaactcacttgataaggaagctgtgaaagaagacaacctcgtccattgggagcgccctcagagacccaaggcaccagtggggcatctttaccaaccccaggctccctctgctgaggtggagatgacatcctatgtgctcctcgcttatctcacggcccagccagcccccacctcaggggacctgacctctgcaactaacattgtgaagtggatcatgaagcagcagaacgcccaaggtggtttctcctccacccaggacacagtggtggctctccatgccctgtccaggtatggagcagccactttcaccagaactgagaaaactgcacaggtcaccgttcaggattcacagaccttttctacaaatttccaagtagacaacaacaacctcctattactgcagcagatctcattgccagagctccctggagaatatgtcataacagtaactggggaaagatgtgtgtatcttcagacatccatgaaatacaatattcttccagagaaagaggactccccatttgctttaaaagtgcagactgtgccccagacttgcgatggacacaaagcccacaccagctttcagatctcactgaccatcagttacacaggaaaccgtcctgcttccaatatggtgattgttgatgtaaagatggtatctggttttattcccctgaaaccaacagtaaaaatgcttgaaagatctagctctgtgagccggacagaagtgagcaacaaccatgtcctcatttatgtggaacaggtgacaaatcagacgctaagtttttccttcatggttctgcaagacatcccagtaggagacttgaagccagcaattgttaaagtctatgattactatgagacagatgagtctgtggttgctgagtatatcgccccctgcagcacagatacagagcatggaaatgtt

SEQ ID NO: 4234 - DNA, 432 bp, Homo Sapiens
caagaggcccagacagagttgccccaggcccggatcagctgcccagaaggcaccaatgcctatcgctcctactgctactactttaatgaagaccgtgagacctgggttgatgcagatctctattgccagaacatgaattcgggcaacctggtgtctgtgctcacccaggccgagggtgcctttgtggcctcactgattaaggagagtggcactgatgacttcaatgtctggattggcctccatgaccccaaaaagaaccgccgctggcactggagcagtgggtccctggtctcctacaagtcctggggcattggagccccaagcagtgttaatcctggctactgtgtgagcctgacctcaagcacaggattccagaaatggaaggatgtgccttgtgaagacaagttctcctttgtctgcaagttcaaaaac

SEQ ID NO: 4235 - DNA, 432 bp, Homo Sapiens
caggagtcccagacagagctgcctaatccccgaatcagctgcccagaaggcaccaatgcctatcgctcctactgctactactttaatgaagaccctgagacctgggttgatgcagatctctattgccagaacatgaattcaggcaacctggtgtctgtgctcacccaggcggagggtgccttcgtggcctcactgattaaggagagtagcactgatgacagcaatgtctggattggcctccatgacccaaaaaagaaccgccgctggcactggagtagtgggtccctggtctcctacaagtcctgggacactggatccccgagcagtgctaatgctggctactgtgcaagcctgacttcatgctcaggattcaagaaatggaaggatgaatcttgtgagaagaagttctcctttgtttgcaagttcaaaaac

SEQ ID NO: 4236 - DNA, 414 bp, Homo Sapiens
atcagctgtcccaaaggctccaaggcctatggctccccctgctatgccttgtttttgtcaccaaaatcctggatggatgcagatctggcttgccagaagcggccctctggaaaactggtgtctgtgctcagtggggctgagggatccttcgtgtcctccctggtgaggagcattagtaacagctactcatacatctggattgggctccatgaccccacacagggctctgagcctgatggagatggatgggagtggagtagcactgatgtgatgaattactttgcatgggagaaaaatccctccaccatcttaaaccctggccactgtgggagcctgtcaagaagcacaggatttctgaagtggaaagattataactgtgatgcaaagttaccctatgtctgcaagttcaaggac

SEQ ID NO: 4237 - DNA, 408 bp, Homo Sapiens
gatatcatcatgagacccagctgtgctcctggatggttttaccacaagtccaattgctatggttacttcaggaagctgaggaactggtctgatgccgagctcgagtgtcagtcttacggaaacggagcccacctggcatctatcctgagtttaaaggaagccagcaccatagcagagtacataagtggctatcagagaagccagccgatatggattggcctgcacgacccacagaagaggcagcagtggcagtggattgatggggccatgtatctgtacagatcctggtctggcaagtccatgggtgggaacaagcactgtgctgagatgagctccaataacaactttttaacttggagcagcaacgaatgcaacaagcgccaacacttcctgtgcaagtaccgacca

SEQ ID NO: 4238 - DNA, 2154 bp, Homo Sapiens
tcgcgtcttcgccaggaggactttcccccgcggattgtggagcatccttccgatgtcatcgtctctaagggcgagcccacgactctgaactgcaaggcggagggccggccaacgcccaccattgagtggtacaaagatggggagcgagtggagactgacaaggacgatccccggtcccacaggatgcttctgcccagcggatccttattcttcttgcgcatcgtgcacgggcgcaggagtaaacctgatgaaggaagctacgtttgtgttgcgaggaactatcttggtgaagcagtgagtcgaaatgcgtctctggaagtggcattgttacgagatgacttccgacaaaaccccacagatgttgtagtggcagctggagagcctgcaatcctggagtgccagcctccccggggacacccagaacccaccatctactggaaaaaagacaaagttcgaattgatgacaaggaagaaagaataagtatccgtggtggaaaactgatgatctccaataccaggaaaagtgatgcagggatgtatacttgtgttggtaccaatatggtgggagaaagggacagtgacccagcagagctgactgtctttgaacgacccacatttctcaggaggccaattaaccaggtggtactggaggaagaagctgtagaatttcgttgtcaagtccaaggagatcctcaaccaactgtgaggtggaaaaaggatgatgcagacttgccaagaggaaggtatgacatcaaagacgattacacactaagaattaaaaagaccatgagtacagatgaaggcacctatatgtgtattgctgagaatcgggttggaaaaatggaagcctctgctacactcaccgtccgagctcgccctgttgctcccccacagtttgtggttcggccaagagatcagattgttgctcaaggtcgaacagtgacatttccctgtgaaactaaaggaaacccacagccagctgttttttggcagaaagaaggcagccagaacctacttttcccaaaccaaccccagcagcccaacagtagatgctcagtgtcaccaactggagacctcacaatcaccaacattcaacgttccgacgcgggttactacatctgccaggctttaactgtggcaggaagcattttagcaaaagctcaactggaggttactgatgttttgacagatagacctccacctataattctacaaggcccagccaaccaaacgctggcagtggatggtacagcgttactgaaatgtaaagccactggtgatcctcttcctgtaattagctggttaaaggagggatttacttttccgggtagagatccaagagcaacaattcaagagcaaggcacactgcagattaagaatttacggatttctgatactggcacttatacttgtgtggctacaagttcaagtggagagacttcctggagtgcagtgctggatgtgacagagtctggagcaacaatcagtaaaaactatgatttaagtgacctgccagggccaccatccaaaccgcaggtcactgatgttactaagaacagtgtcaccttgtcctggcagccaggtacccctggaacccttccagcaagtgcatatatcattgaggctttcagccaatcagtgagcaacagctggcagaccgtggcaaaccatgtaaagaccaccctctatactgtaagaggactgcggcccaatacaatctacttattcatggtcagagcgatcaacccccaaggtctcagtgacccaagtcccatgtcagatcctgtgcgcacacaagatatcagcccaccagcacaaggagtggaccacaggcaagtgcagaaagagctaggagatgtccttgtccgtcttcataatccagttgtgctgactcccaccacggttcaggtcacatggacggttgatcgccaaccccagtttatccaaggctaccgagtgatgtatcgtcagacttcaggtctgcaggcgacatcttcgtggcagaatttagatgccaaagtcccgactgaacgaagtgctgtcttagtcaacctgaaaaagggggtgacttatgaaattaaagtacggccatattttaatgagttccaaggaatggatagtgaatctaaaacggttcgtactactgaagaagcc

SEQ ID NO: 4239 - DNA, 1323 bp, Homo Sapiens
caggactccccgccccagatcctagtccacccccaggaccagctgttccagggccctggccctgccaggatgagctgccaagcctcaggccagccacctcccaccatccgctggttgctgaatgggcagcccctgagcatggtgcccccagacccacaccacctcctgcctgatgggacccttctgctgctacagccccctgcccggggacatgcccacgatggccaggccctgtccacagacctgggtgtctacacatgtgaggccagcaaccggcttggcacggcagtcagcagaggcgctcggctgtctgtggctgtcctccgggaggatttccagatccagcctcgggacatggtggctgtggtgggtgagcagtttactctggaatgtgggccgccctggggccacccagagcccacagtctcatggtggaaagatgggaaacccctggccctccagcccggaaggcacacagtgtccggggggtccctgctgatggcaagagcagagaagagtgacgaagggacctacatgtgtgtggccaccaacagcgcaggacatagggagagccgcgcagcccgggtttccatccaggagccccaggactacacggagcctgtggagcttctggctgtgcgaattcagctggaaaatgtgacactgctgaacccggatcctgcagagggccccaagcctagaccggcggtgtggctcagctggaaggtcagtggccctgctgcgcctgcccaatcttacacggccttgttcaggacccagactgccccgggaggccagggagctccgtgggcagaggagctgctggccggctggcagagcgcagagcttggaggcctccactggggccaagactacgagttcaaagtgagaccatcctctggccgggctcgaggccctgacagcaacgtgctgctcctgaggctgccggaaaaagtgcccagtgccccacctcaggaagtgactctaaagcctggcaatggcactgtctttgtgagctgggtcccaccacctgctgaaaaccacaatggcatcatccgtggctaccaggtctggagcctgggcaacacatcactgccaccagccaactggactgtagttggtgagcagacccagctggaaatcgccacccatatgccaggctcctactgcgtgcaagtggctgcagtcactggtgctggagctggggagcccagtagacctgtctgcctccttttagagcaggccatggagcgagccacccaagaacccagtgagcatggtccctggaccctggagcagctgagggctaccttgaagcggcct

SEQ ID NO: 4240 - DNA, 1092 bp, Homo Sapiens
caagaaacagagctgtcagtcagtgctgaattagtgcctacctcatcatggaacatctcaagtgaactcaacaaagattcttacctgacccttgatgaaccaatgaataacatcaccacgtctctgggccagacagcagaactgcactgcaaagtctctgggaatccacctcccaccatccgctggttcaaaaatgatgctcctgtggtccaggagccccggaggctctcctttcggtccaccatctatggctctcggctgcggattagaaacctcgacaccacagacacaggctacttccagtgcgtggcaacaaacggcaaggaggtggtttcttccactggagtcttgtttgtcaagtttggcccccctcccactgcaagtccaggatactcagatgagtatgaagaagatggattctgtcagccatacagagggattgcatgtgcaagatttattggcaaccgcaccgtctatatggagtctttgcacatgcaaggggaaatagaaaatcagatcacagctgccttcactatgattggcacttccagtcacttatctgataagtgttctcagttcgccattccttccctgtgccactatgccttcccgtactgcgatgaaacttcatccgtcccaaagccccgtgacttgtgtcgcgatgaatgtgaaatcctggagaatgtcctgtgtcaaacagagtacatttttgcaagatcaaatcccatgattctgatgaggctgaaactgccaaactgtgaagatctcccccagccagagagcccagaagctgcgaactgtatccggattggaattcccatggcagatcctataaataaaaatcacaagtgttataacagcacaggtgtggactaccgggggaccgtcagtgtgaccaaatcagggcgccagtgccagccatggaattcccagtatccccacacacacactttcaccgcccttcgtttcccagagctgaatggaggccattcctactgccgcaacccagggaatcaaaaggaagctccctggtgcttcaccttggatgaaaactttaagtctgatctgtgtgacatcccagcttgcggtaaa

SEQ ID NO: 4241 - DNA, 1110 bp, Homo Sapiens
gaagtggaggttctggatccgaacgaccctttaggaccccttgatgggcaggacggcccgattccaactctgaaaggttactttctgaattttctggagccagtaaacaatatcaccattgtccaaggccagacggcaattctgcactgcaaggtggcaggaaacccaccccctaacgtgcggtggctaaagaatgatgccccggtggtgcaggagccgcggcggatcatcatccggaagacagaatatggttcacgactgcgaatccaggacctggacacgacagacactggctactaccagtgcgtggccaccaacgggatgaagaccattaccgccactggcgtcctgtttgtgcggctgggtccaacgcacagcccaaatcataactttcaggatgattaccacgaggatgggttctgccagccttaccggggaattgcctgtgcacgcttcattggcaaccggaccatttatgtggactcgcttcagatgcagggggagattgaaaaccgaatcacagcggccttcaccatgatcggcacgtctacgcacctgtcggaccagtgctcacagttcgccatcccatccttctgccacttcgtgtttcctctgtgcgacgcgcgctcccgggcacccaagccgcgtgagctgtgccgcgacgagtgcgaggtgctggagagcgacctgtgccgccaggagtacaccatcgcccgctccaacccgctcatcctcatgcggcttcagctgcccaagtgtgaggcgctgcccatgcctgagagccccgacgctgccaactgcatgcgcattggcatcccagccgagaggctgggccgctaccatcagtgctataacggctcaggcatggattacagaggaacggcaagcaccaccaagtcaggccaccagtgccagccgtgggccctgcagcacccccacagccaccacctgtccagcacagacttccctgagcttggaggggggcacgcctactgccggaaccccggaggccagatggagggcccctggtgctttacgcagaataaaaacgtacgcatggaactgtgtgacgtaccctcgtgtagtccccgagacagcagcaagatgggg

SEQ ID NO: 4242 - DNA, 774 bp, Homo Sapiens
acagttttaaatagctgcctaaagtcgtgtgtaactaatctgggccagcagcttgaccttggcacaccacataatctgagtgaaccgtgtatccaaggatgtcacttttggaactctgtagatcagaaaaactgtgctttaaagtgtcgggagtcgtgtgaggttggctgtagcagcgcggaaggtgcatatgaagaggaagtactggaaaatgcagacctaccaactgctccctttgcttcttccattggaagccacaatatgacattacgatggaaatctgcaaacttctctggagtaaaatacatcattcagtggaaatatgcacaacttctgggaagctggacttatactaagactgtgtccagaccgtcctatgtggtcaagcccctgcaccccttcactgagtacattttccgagtggtttggatcttcacagcgcagctgcagctctactcccctccaagtcccagttacaggactcatcctcatggagttcctgaaactgcacctttgattaggaatattgagagctcaagtcccgacactgtggaagtcagctgggatccacctcaattcccaggtggacctattttgggttataacttaaggctgatcagcaaaaatcaaaaattagatgcagggacacagagaaccagtttccagttttactccactttaccaaatactatctacaggttttctattgcagcagtaaatgaagttggtgagggtccagaagcagaatctagtattaccacttcatcttcagca

SEQ ID NO: 4243 - DNA, 1263 bp, Homo Sapiens
tgcccaggtgcctgcgtatgctacaatgagcccaaggtgacgacaagctgcccccagcagggcctgcaggctgtgcccgtgggcatccctgctgccagccagcgcatcttcctgcacggcaaccgcatctcgcatgtgccagctgccagcttccgtgcctgccgcaacctcaccatcctgtggctgcactcgaatgtgctggcccgaattgatgcggctgccttcactggcctggccctcctggagcagctggacctcagcgataatgcacagctccggtctgtggaccctgccacattccacggcctgggccgcctacacacgctgcacctggaccgctgcggcctgcaggagctgggcccggggctgttccgcggcctggctgccctgcagtacctctacctgcaggacaacgcgctgcaggcactgcctgatgacaccttccgcgacctgggcaacctcacacacctcttcctgcacggcaaccgcatctccagcgtgcccgagcgcgccttccgtgggctgcacagcctcgaccgtctcctactgcaccagaaccgcgtggcccatgtgcacccgcatgccttccgtgaccttggccgcctcatgacactctatctgtttgccaacaatctatcagcgctgcccactgaggccctggcccccctgcgtgccctgcagtacctgaggctcaacgacaacccctgggtgtgtgactgccgggcacgcccactctgggcctggctgcagaagttccgcggctcctcctccgaggtgccctgcagcctcccgcaacgcctggctggccgtgacctcaaacgcctagctgccaatgacctgcagggctgcgctgtggccaccggcccttaccatcccatctggaccggcagggccaccgatgaggagccgctggggcttcccaagtgctgccagccagatgccgctgacaaggcctcagtactggagcctggaagaccagcttcggcaggcaatgcgctgaagggacgcgtgccgcccggtgacagcccgccgggcaacggctctggcccacggcacatcaatgactcaccctttgggactctgcctggctctgctgagcccccgctcactgcagtgcggcccgagggctccgagccaccagggttccccacctcgggccctcgccggaggccaggctgttcacgcaagaaccgcacccgcagccactgccgtctgggccaggcaggcagcgggggtggcgggactggtgactcagaaggctca

SEQ ID NO: 4244 - DNA, 1188 bp, Homo Sapiens
tgcccacgggactgtgtgtgctacccggcgcccatgacggtcagctgccaggcgcacaactttgcagccatcccggagggcatccccgtggacagcgagcgcgtcttcctgcagaacaaccgcatcggcctcctccagcccggccacttcagccccgccatggtcaccctgtggatctactcgaacaacatcacctacatccaccccagcaccttcgagggcttcgtgcacctggaggagctggacctcggcgacaaccggcagctgcggacgctggcacccgagaccttccagggcctggtgaagcttcacgccctctacctctacaagtgtgggctcagcgccttgccggccggcgtctttggcggcctgcacagcctgcagtacctctacctgcaggacaaccacatcgagtacctccaggacgacatcttcgtggacctggtcaacctcagccacctgtttctccacggcaacaagctgtggagtctgggcccgggcaccttccggggcctggtgaacctggaccgtcttttgctgcacgagaaccagctgcagtgggtccaccacaaggcattccacgacctccgcaggctgaccaccctcttcctcttcaacaacagcctctcggagctgcagggtgagtgcctggccccgctgggggccctggagttcctccgcctcaatggcaacccctgggactgtggttgtcgcgcgcgctccctgtgggaatggctgcagaggttccggggctccagctccgctgtcccctgtgtgtcccctgggctgcggcacggccaggacctgaagctgctgagggccgaggacttccggaactgcacgggaccagcgtccccgcaccagatcaagtcacacacgctcaccaccaccgacagggccgcccgcaaggaacaccactcaccccacggccccaccaggagcaagggccacccgcacggcccccggcccggccacaggaagccggggaagaactgcaccaaccccaggaaccgcaatcagatctctaaggcgggcgccgggaaacaggcccccgagctgccagactatgccccagactaccagcacaagttcagttttgacatcatgcctacggcccggcccaagaggaagggcaagtgtgcccgcaggacccccatccgtgcccccagcggggtgcagcaggcctcc

SEQ ID NO: 4245 - DNA, 1032 bp, Homo Sapiens
caggccaacaacttctcctctgtgccgctgtccctgccacccagcactcagcgactcttcctgcagaacaacctcatccgcacgctgcggccaggcacctttgggtccaacctgctcaccctgtggctcttctccaacaacctctccaccatctacccgggcactttccgccacttgcaagccctggaggagctggacctcggtgacaaccggcacctgcgctcgctggagcccgacaccttccagggcctggagcggctgcagtcgctgcatttgtaccgctgccagctcagcagcctgcccggcaacatcttccgaggcctggtcagcctgcagtacctctacctccaggagaacagcctgctccacctacaggatgacttgttcgcggacctggccaacctgagccacctcttcctccacgggaaccgcctgcggctgctcacagagcacgtgtttcgcggcctgggcagcctggaccggctgctgctgcacgggaaccggctgcagggcgtgcaccgcgcggccttccgcggcctcagccgcctcaccatcctctacctgttcaacaacagcctggcctcgctgcccggcgaggcgctcgccgacctgccctcgctcgagttcctgcggctcaacgctaacccctgggcgtgcgactgccgcgcgcggccgctctgggcctggttccagcgcgcgcgcgtgtccagctccgacgtgacctgcgccacccccccggagcgccagggccgagacctgcgcgcgctccgcgaggccgacttccaggcgtgtccgcccgcggcacccacgcggccgggcagccgcgcccgcggcaacagctcctccaaccacctgtacggggtggccgaggccggggcgcccccagccgatccctccaccctctaccgagatctgcctgccgaagactcgcgggggcgccagggcggggacgcgcctactgaggacgactactgggggggctacgggggtgaggaccagcgaggggagcagatgtgccccggcgctgcctgc

SEQ ID NO: 4246 - DNA, 1227 bp, Homo Sapiens
atgacatctggttctgtcttcttctacatcttaatttttggaaaatatttttctcatgggggtggacaggatgtcaagtgctcccttggctatttcccctgtgggaacatcacaaagtgcttgcctcagctcctgcactgtaacggtgtggacgactgcgggaatcaggccgatgaggacaactgtggagacaacaatggatggtctctgcaatttgacaaatattttgccagttactacaaaatgacttcccaatatccttttgaggcagaaacacctgaatgtttggtcggttctgtgccagtgcaatgtctttgccaaggtctggagcttgactgtgatgaaaccaatttacgagctgttccatcggtttcttcaaatgtgactgcaatgtcacttcagtggaacttaataagaaagcttcctcctgattgcttcaagaattatcatgatcttcagaagctgtacctgcaaaacaataagattacatccatctccatctatgctttcagaggactgaatagccttactaaactgtatctcagtcataacagaataaccttcctgaagccgggtgtttttgaagatcttcacagactagaatggctgataattgaagataatcacctcagtcgaatttccccaccaacattttatggactaaattctcttattctcttagtcctgatgaataacgtcctcacccgtttacctgataaacctctctgtcaacacatgccaagactacattggctggaccttgaaggcaaccatatccataatttaagaaatttgacttttatttcctgcagtaatttaactgttttagtgatgaggaaaaacaaaattaatcacttaaatgaaaatacttttgcacctctccagaaactggatgaattggatttaggaagtaataagattgaaaatcttccaccgcttatattcaaggacctgaaggagctgtcacaattgaatctttcctataatccaatccagaaaattcaagcaaaccaatttgattatcttgtcaaactcaagtctctcagcctagaagggattgaaatttcaaatatccaacaaaggatgtttagacctcttatgaatctctctcacatatattttaagaaattccagtactgtgggtatgcaccacatgttcgcagctgtaaaccaaacactgatggaatttcatctctagagaatctcttggcaagcattattcagaga

SEQ ID NO: 4247 - DNA, 1167 bp, Homo Sapiens
agaaaagtggactctctctccgaagacatctccttgacccagtctatttatgacaagaagcttgtgttaatgcagaaaaatctccagggcctggatccgaaagccctgaacaactgctctttctgccatgaagctgggcagctggggccagagatccgaaaactgcaggaggagctggagggaattcagaagctgcttctggcccaggaggtgcagctggaccagaccttacaggcccaggaggtgctctccaccaccagcagacaaatctcccaggagatgggcagttgctccttctccatccaccaggttaaccagtctctggggctcttcctggcccaggtgagaggctggcaggccaccacagctggcctggacctctctctgaaggacctcacccaggagtgctacgatgtcaaggctgcagtgcaccagatcaacttcaccgtggggcagacttccgagtggatccacgggatccagcggaagacagacgaggagaccctgaccctccagaagattgtcaccgactggcagaactacacacggctcttcagcggcctgcgcaccacctccaccaagactggagaggcggtcaagaacatccaggccaccctgggggcctcctcacagcgcatcagccagaactcagagagcatgcacgacctggtactccaggtcatgggcttgcagctgcagctggataacatctcgtccttcctggatgaccacgaagagaacatgcatgatcttcagtaccatacccactacgcccagaaccgcactgtggagaggtttgagtctctggaaggacgcatggcttctcacgagattgaaattggcaccatcttcaccaacatcaatgccaccgacaaccacgtgcacagcatgctcaagtacctggatgacgtgcggctctcctgcacgctgggcttccacacccatgccgaggagctctactacctgaacaagtctgtctccatcatgctgggcaccacagacctgctccgggagcgcttcagcctgctcagtgcccggctggacctcaacgtccggaacctctccatgatcgtggaggagatgaaggcagtggacacacagcatggagaaatccttcgcaatgtcaccatcctacgaggtcacactttgttttcacataatcggata

SEQ ID NO: 4248 - DNA, 1206 bp, Homo Sapiens
tccgagctggaccccaaagggcagcacgtctgtgtggccagcagcccctctgctgagctgcagtgctgcgcaggctggaggcagaaggatcaagaatgcaccatccccatctgtgaggggccggacgcctgccagaaagacgaggtgtgtgtgaagccgggcctctgtcgatgcaagcctggattctttggggcccactgcagctcccgctgcccgggccagtactggggccccgactgccgtgagagctgcccctgccacccgcacggccagtgcgagccagccacgggcgcgtgccagtgccaggccgaccgctggggagcccgctgcgagttcccgtgcgcctgcggcccccacgggcgctgcgaccccgcgaccggcgtgtgccactgcgaacccggctggtggtcgtccacgtgccgccgcccgtgccagtgcaacaccgcggcggcgcgctgcgagcaggccacgggcgcctgcgtgtgcaagccgggctggtgggggcgccgctgcagcttccgctgcaactgccacggctccccgtgcgagcaggactccggccgctgcgcctgccggccgggctggtggggtcccgaatgccagcagcagtgcgagtgtgtgcggggccgctgcagcgccgcctccggcgagtgcacctgcccgcccggcttccgcggagcgcgctgcgagctgccctgcccggcaggcagccacggggtgcagtgcgcacacagctgtggccgctgcaaacacaatgagccgtgctctccagacacaggcagctgtgagtcctgcgagccgggctggaacgggacccagtgccagcagccctgcctgcctggcacctttggcgagagctgcgaacagcagtgccctcactgccgacatggggaggcctgtgagccagatactggccactgtcagcgctgtgaccctggctggctggggcccaggtgtgaagacccctgccccactggtacctttggggaagactgtggctctacctgccccacctgtgttcaggggtcctgtgatactgtgacaggggactgtgtctgcagtgccggctactgggggcccagctgcaacgcctcctgcccagccggtttccatggaaacaactgctcagttccttgtgaatgcccagagggactctgccaccctgtctctgggtcctgccagccaggctctggcagtcgggacact

SEQ ID NO: 4249 - DNA, 1194 bp, Homo Sapiens
caggagctaaaccctagagggaggaatgtgtgtcgtgcccccggttcacaggtccctacatgttgcgctggttggaggcaacaaggtgatgaatgcgggatagccgtttgcgaaggcaacagcacctgcagcgagaatgaagtatgtgtcaggcctggagaatgcagatgcaggcatgggtacttcggagcgaactgcgatactaaatgtcctagacagttctggggaccagattgtaaagaactttgcagctgccaccctcacgggcaatgtgaggatgtgacgggtcaatgcacttgtcatgcaaggaggtggggtgccaggtgcgaacacgcctgtcagtgccaacatggcacatgccatcctaggagtggcgcctgtcgttgcgaacctggatggtggggagcgcaatgtgcgtccgcttgctattgctccgccacatccagatgcgatccccaaacaggggcgtgcctgtgccatgcggggtggtgggggaggagttgtaataaccaatgcgcctgcaacagttcaccgtgtgagcaacagagtggtagatgccaatgccgtgaaagaacattcggcgcaaggtgcgaccgttattgccagtgctttcgtggtcgttgtcacccagtagatgggacgtgcgcttgtgagcctggttatagaggaaagtactgcagagagccttgtccggccgggttctacggacttggatgtcgtcgtcgttgcgggcagtgtaaggggcagcaaccttgtactgtggcggagggcagatgcttgacgtgtgaacctggttggaatgggacgaaatgtgaccaaccttgtgccactggcttttacggtgaaggttgttctcacaggtgtccaccatgccgtgacggacacgcctgcaaccacgttacgggcaaatgtacgaggtgtaacgcaggatggatcggtgaccgttgtgagacgaaatgctcaaatgggacctacggcgaagactgtgccttcgtatgcgcggactgtggaagtggacactgcgacttccagtccgggaggtgcctatgcagccccggtgttcacggcccgcattgcaatgttacatgtccccctggtctgcatggtgcagactgtgcccaggcgtgctcctgtcatgaggatacctgtgacccggttacaggggcttgtcacttggaaactaatcaaaggaag

SEQ ID NO: 4250 - DNA, 426 bp, Homo Sapiens
gggggctgcgtggaggtggactcggagaccgaggccgtgtatgggatgaccttcaaaattctttgcatctcctgcaagcgccgcagcgagaccaacgctgagaccttcaccgagtggaccttccgccagaagggcactgaggagtttgtcaagatcctgcgctatgagaatgaggtgttgcagctggaggaggatgagcgcttcgagggccgcgtggtgtggaatggcagccggggcaccaaagacctgcaggatctgtctatcttcatcaccaatgtcacctacaaccactcgggcgactacgagtgccacgtctaccgcctgctcttcttcgaaaactacgagcacaacaccagcgtcgtcaagaagatccacattgaggtagtggacaaagccaacagagacatggcatccatcgtgtctgag

SEQ ID NO: 4251 - DNA, 390 bp, Homo Sapiens
atggaggtcacagtacctgccaccctcaacgtcctcaatggctctgacgcccgcctgccctgcaccttcaactcctgctacacagtgaaccacaaacagttctccctgaactggacttaccaggagtgcaacaactgctctgaggagatgttcctccagttccgcatgaagatcattaacctgaagctggagcggtttcaagaccgcgtggagttctcagggaaccccagcaagtacgatgtgtcggtgatgctgagaaacgtgcagccggaggatgaggggatttacaactgctacatcatgaacccccctgaccgccaccgtggccatggcaagatccatctgcaggtcctcatggaagagccccctgagcgggactccacggtggcc

SEQ ID NO: 4252 - DNA, 411 bp, Homo Sapiens
ttccctgtgtgtgtggaagtgccctcggagacggaggccgtgcagggcaaccccatgaagctgcgctgcatctcctgcatgaagagagaggaggtggaggccaccacggtggtggaatggttctacaggcccgagggcggtaaagatttccttatttacgagtatcggaatggccaccaggaggtggagagcccctttcaggggcgcctgcagtggaatggcagcaaggacctgcaggacgtgtccatcactgtgctcaacgtcactctgaacgactctggcctctacacctgcaatgtgtcccgggagtttgagtttgaggcgcatcggccctttgtgaagacgacgcggctgatccccctaagagtcaccgaggaggctggagaggacttcacctctgtggtctcagaa

SEQ ID NO: 4253 - DNA, 396 bp, Homo Sapiens
ttggaagtttcagtgggtaaggccaccgatatatacgccgtgaacggcacggaaatcttgctaccttgcaccttctcatcttgcttcggattcgaagatttgcattttagatggacttacaacagttcagatgctttcaagatacttattgaaggaacggtcaaaaacgagaaaagtgacccgaaggtaactctaaaagacgatgataggataacgttagtcggaagcactaaggaaaagatgaacaatataagcatagtccttcgtgacctggagttttccgacacgggtaaatacacctgccatgttaaaaaccccaaagagaataatctacagcatcacgctactatctttctacaggttgttgacaggctagaggaggtagacaatacggtt

SEQ ID NO: 4254 - DNA, 2895 bp, Homo Sapiens
gggggcagcgggctcccagggtcagtcgacgtggatgagtgctcagagggcacagatgactgccacatcgatgccatctgtcagaacacgcccaagtcctacaaatgcctctgcaagccaggctacaagggggaaggcaagcagtgtgaagacattgacgagtgtgagaatgactactacaatgggggctgtgtccacgagtgcatcaacatcccggggaactacaggtgtacctgctttgatggcttcatgctggcacacgatggacacaactgcctggatgtggacgagtgtcaggacaataatggtggctgccagcagatctgcgtcaatgccatgggcagctacgagtgtcagtgccacagtggcttcttccttagtgacaaccagcatacctgcatccaccgctccaatgagggtatgaactgcatgaacaaagaccatggctgtgcccacatctgccgggagacgcccaaaggtggggtggcctgcgactgcaggcccggctttgaccttgcccaaaaccagaaggactgcacactaacctgtaattatggaaacggaggctgccagcacagctgtgaggacacagacacaggccccacgtgtggttgccaccagaagtacgccctccactcagacggtcgcacgtgcatcgagacgtgcgcagtcaataacggaggctgcgaccggacatgcaaggacacagccactggcgtgcgatgcagctgccccgttggattcacactgcagccggacgggaagacatgcaaagacatcaacgagtgcctggtcaacaacggaggctgcgaccacttctgccgcaacaccgtgggcagcttcgagtgcggctgccggaagggctacaagctgctcaccgacgagcgcacctgccaggacatcgacgagtgctccttcgagcggacctgtgaccacatctgcatcaactccccgggcagcttccagtgcctgtgtcaccgcggctacatcctctacgggacaacccactgcggagatgtggacgagtgcagcatgagcaacgggagctgtgaccagggctgcgtcaacaccaagggcagctacgagtgcgtctgtcccccggggaggcggctccactggaacgggaaggattgcgtggagacaggcaagtgtctttctcgcgccaagacctccccccgggcccagctgtcctgcagcaaggcaggcggtgtggagagctgcttcctttcctgcccggctcacacactcttcgtgccagactcggaaaatagctacgtcctgagctgcggagttccagggccgcagggcaaggcgctgcagaaacgcaacggcaccagctctggcctcgggcccagctgctcagatgcccccaccacccccatcaaacagaaggcccgcttcaagatccgagatgccaagtgccacctccggccccacagccaggcacgagcaaaggagaccgccaggcagccgctgctggaccactgccatgtgactttcgtgaccctcaagtgtgactcctccaagaagaggcgccgtggccgcaagtccccatccaaggaggtgtcccacatcacagcagagtttgagatcgagacaaagatggaagaggcctcagacacatgcgaagcggactgcttgcggaagcgagcagaacagagcctgcaggccgccatcaagaccctgcgcaagtccatcggccggcagcagttctatgtccaggtctcaggcactgagtacgaggtagcccagaggccagccaaggcgctggaggggcagggggcatgtggcgcaggccaggtgctacaggacagcaaatgcgttgcctgtgggcctggcacccacttcggtggtgagctcggccagtgtgtgtcatgtatgccaggaacataccaggacatggaaggccagctcagttgcacaccgtgccccagcagcgacgggcttggtctgcctggtgcccgcaacgtgtcggaatgtggaggccagtgttctccaggcttcttctcggccgatggcttcaagccctgccaggcctgccccgtgggcacgtaccagcctgagcccgggcgcaccggctgcttcccctgtggagggggtttgctcaccaaacacgaaggcaccacctccttccaggactgcgaggctaaagtgcactgctcccccggccaccactacaacaccaccacccaccgctgcatccgctgccccgtcggcacctaccagcccgagtttggccagaaccactgcatcacctgtccgggcaacaccagcacagacttcgatggctccaccaacgtcacacactgcaaaaaccagcactgcggcggcgagcttggtgactacaccggctacatcgagtcccccaactaccctggcgactacccagccaacgctgaatgcgtctggcacatcgcgcctcccccaaagcgcaggatcctcatcgtggtccctgagatcttcctgcccatcgaggatgagtgcggcgatgttctggtcatgaggaagagtgcctctcccacgtccatcaccacctatgagacctgccagacctacgagaggcccatcgccttcacctcccgctcccgcaagctctggatccagttcaaatccaatgaaggcaacagcggcaaaggcttccaagtgccctatgtcacctacgatgaggactaccagcaactcatagaggacatcgtgcgcgatgggcgcctgtacgcctcggagaaccaccaggaaattttgaaagacaagaagctgatcaaggccctcttcgacgtgctggcgcatccccagaactacttcaagtacacagcccaggaatccaaggagatgttcccacggtccttcatcaaactgctgcgctccaaagtgtctcggttcctgcggccctacaaa

SEQ ID NO: 4255 - DNA, 2328 bp, Homo Sapiens
gtcccgccgggtcggggccgtgccgcggggccgcaggaggatgtagatgagtgtgcccaagggctagatgactgccatgccgacgccctgtgtcagaacacacccacctcctacaagtgctcctgcaagcctggctaccaaggggaaggcaggcagtgtgaggacatcgatgaatgtggaaatgagctcaatggaggctgtgtccatgactgtttgaatattccaggcaattatcgttgcacttgttttgatggcttcatgttggctcatgacggtcataattgtcttgatgtggacgagtgcctggagaacaatggcggctgccagcatacctgtgtcaacgtcatggggagctatgagtgctgctgcaaggaggggtttttcctgagtgacaatcagcacacctgcattcaccgctcggaagagggcctgagctgcatgaataaggatcacggctgtagtcacatctgcaaggaggccccaaggggcagcgtcgcctgtgagtgcaggcctggttttgagctggccaagaaccagagagattgcatcttgacctgtaaccatgggaacggtgggtgccagcactcctgtgacgatacagccgatggcccagagtgcagctgccatccacagtacaagatgcacacagatgggaggagctgccttgagcgagaggacactgtcctggaggtgacagagagcaacaccacatcagtggtggatggggataaacgggtgaaacggcggctgctcatggaaacgtgtgctgtcaacaatggaggctgtgaccgcacctgtaaggatacttcgacaggtgtccactgcagttgtcctgttggattcactctccagttggatgggaagacatgtaaagatattgatgagtgccagacccgcaatggaggttgtgatcatttctgcaaaaacatcgtgggcagttttgactgcggctgcaagaaaggatttaaattattaacagatgagaagtcttgccaagatgtggatgagtgctctttggataggacctgtgaccacagctgcatcaaccaccctggcacatttgcttgtgcttgcaaccgagggtacaccctgtatggcttcacccactgtggagacaccaatgagtgcagcatcaacaacggaggctgtcagcaggtctgtgtgaacacagtgggcagctatgaatgccagtgccaccctgggtacaagctccactggaataaaaaagactgtgtggcttcttgtgacctgagctgcatcgtaaagcgaaccgagaagcggctccgtaaagccatccgcacgctcagaaaggccgtccacagggagcagtttcacctccagctctcaggcatgaacctcgacgtggctaaaaagcctcccagaacatctgaacgccaggcagagtcctgtggagtgggccagggtcatgcagaaaaccaatgtgtcagttgcagggctgggacctattatgatggagcacgagaacgctgcattttatgtccaaatggaaccttccaaaatgaggaaggacaaatgacttgtgaaccatgcccaagaccaggaaattctggggccctgaagaccccagaagcttggaatatgtctgaatgtggaggtctgtgtcaacctggtgaatattctgcagatggctttgcaccttgccagctctgtgccctgggcacgttccagcctgaagctggtcgaacttcctgcttcccctgtggaggaggccttgccaccaaacatcagggagctacttcctttcaggactgtgaaaccagagttcaatgttcacctggacatttctacaacaccaccactcaccgatgtattcgttgcccagtgggaacataccagcctgaatttggaaaaaataattgtgtttcttgcccaggaaatactacgactgactttgatggctccacaaacataacccagtgtaaaacttcatccaattctgtgacaacatatgaaacctgccagacctacgaacgccccatcgccttcacctccaggtcaaagaagctgtggattcagttcaagtccaatgaagggaacagcgctagagggttccaggtcccatacgtgacatatgatgaggactaccaggaactcattgaagacatagttcgagatggcaggctctatgcatctgagaaccatcaggaaatacttaaggataagaaacttatcaaggctctgtttgatgtcctggcccatccccagaactatttcaagtacacagcccaggagtcccgagagatgtttccaagatcgttcatccgattgctacgttccaaagtgtccaggtttttgagaccttacaaa

SEQ ID NO: 4256 - DNA, 2916 bp, Homo Sapiens
gcccagtacagcaaagccgcgcaagatgtggatgagtgtgtggaggggactgacaactgccacatcgatgctatctgccagaacaccccgaggtcatacaagtgcatctgcaagtctggctacacaggggacggcaaacactgcaaagacgtggatgagtgcgagcgagaggataatgcaggttgtgtgcatgactgtgtcaacatccctggcaattaccggtgtacctgctatgatggattccacctggcacatgacggacacaactgtctggatgtggacgagtgtgccgagggcaacggcggctgtcagcagagctgtgtcaacatgatgggcagctatgagtgccactgccgggaaggcttcttcctcagcgacaaccagcatacctgtatccagcggccagaaggaatgaactgcatgaacaagaaccacggctgtgcccacatttgccgggagacacccaaggggggtattgcctgtgaatgccgtcctggctttgagcttaccaagaaccaacgggactgtaaattgacatgcaactatggtaacggcggctgccagcacacgtgtgatgacacagagcagggtccccggtgcggctgccatatcaagtttgtgctccataccgacgggaagacatgcatcgagacctgtgctgtcaacaacgggggctgtgacagtaagtgccatgatgcagcgattggtgtccactgcacctgccctgtgggcttcatgctgcagccagacaggaagacgtgcaaagatatagatgagtgccgcttaaacaacgggggctgtgaccatatttgccgcaacacagtgggcagcttcgaatgcagttgcaagaaaggctataagcttctcatcaatgagaggaactgccaggatatagacgagtgttcctttgatcgaacctgtgaccacatatgtgtcaacacaccaggaagcttccagtgtctctgccatcgtggctacctgttgtatggtatcacccactgtggggatgtggatgaatgcagcatcaaccggggaggttgccgctttggctgcatcaacactcctggcagctaccagtgtacctgcccagcaggccagggtcggctgcactggaatggcaaagattgcacagagccactgaagtgtcagggcagtcctggggcctcgaaagccatgctcagctgcaaccggtctggcaagaaggacacctgtgccctgacctgtccctccagggcccgatttttgccagagtctgagaatggcttcacggtgagctgtgggacccccagccccagggctgctccagcccgagctggccacaatgggaacagcaccaactccaaccactgccatgaggctgcagtgctgtccattaaacaacgggcctccttcaagatcaaggatgccaaatgccgtttgcacctgcgaaacaaaggcaaaacagaggaggctggcagaatcacagggccaggtggtgccccctgctctgaatgccaggtcaccttcatccaccttaagtgtgactcctctcggaagggcaagggccgacgggcccggacccctccaggcaaagaggtcacaaggctcaccctggaactggaggcagaggtcagagccgaagaaaccacagccagctgtgggctgccctgcctccgacagcgaatggaacggcggctgaaaggatccctgaagatgctcagaaagtccatcaaccaggaccgcttcctgctgcgcctggcaggccttgattatgagctggcccacaagccgggcctggtagccggggagcgagcagagccgatggagtcctgtaggcccgggcagcaccgtgctgggaccaagtgtgtcagctgcccgcagggaacgtattaccacggccagacggagcagtgtgtgccatgcccagcgggcaccttccaggagagagaagggcagctctcctgcgacctttgccctgggagtgatgcccacgggcctcttggagccaccaacgtcaccacgtgtgcaggtcagtgcccacctggccaacactctgtagatgggttcaagccctgtcagccatgcccacgtggcacctaccaacctgaagcaggacggaccctatgcttcccttgtggtgggggcctcaccaccaagcatgaaggggccatttccttccaagactgtgacaccaaagtccagtgctccccagggcactactacaacaccagcatccaccgctgtattcgctgtgccatgggctcctatcagcccgacttccgtcagaacttctgcagccgctgtccaggaaacacaagcacagactttgatggctctaccagtgtggcccaatgcaagaatcgtcagtgtggtggggagctgggtgagttcactggctatattgagtcccccaactacccgggcaactacccagctggtgtggagtgcatctggaacatcaaccccccacccaagcgcaagatccttatcgtggtaccagagatcttcctgccatctgaggatgagtgtggggacgtcctcgtcatgagaaagaactcatccccatcctccattaccacttatgagacctgccagacctacgagcgtcccattgccttcactgcccgttccaggaagctctggatcaacttcaagacaagcgaggccaacagcgcccgtggcttccagattccctatgttacctatgatgaggactatgagcagctggtagaagacattgtgcgagatggccggctctatgcctctgaaaaccaccaggagattttaaaggacaagaagctcatcaaggccttctttgaggtgctagcccacccccagaactacttcaagtacacagagaaacacaaggagatgctgccaaaatccttcatcaagctgctccgctccaaagtttccagcttcctgaggccctacaaa

SEQ ID NO: 4257 - DNA, 660 bp, Homo Sapiens
caaattgtggctactaatttgccccctgaagatcaagatggctctggggatgactctgacaacttctccggctcaggtgcaggtgctttgcaagatatcaccttgtcacagcagaccccctccacttggaaggacacgcagctcctgacggctattcccacgtctccagaacccaccggcctggaggctacagctgcctccacctccaccctgccggctggagaggggcccaaggagggagaggctgtagtcctgccagaagtggagcctggcctcaccgcccgggagcaggaggccaccccccgacccagggagaccacacagctcccgaccactcatcaggcctcaacgaccacagccaccacggcccaggagcccgccacctcccacccccacagggacatgcagcctggccaccatgagacctcaacccctgcaggacccagccaagctgaccttcacactccccacacagaggatggaggtccttctgccaccgagagggctgctgaggatggagcctccagtcagctcccagcagcagagggctctggggagcaggacttcacctttgaaacctcgggggagaatacggctgtagtggccgtggagcctgaccgccggaaccagtccccagtggatcagggggccacgggggcc

SEQ ID NO: 4258 - DNA, 378 bp, Homo Sapiens
gagtcgagagcagagctgacatctgataaagacatgtaccttgacaacagctccattgaagaagcttcaggagtgtatcctattgatgacgatgactacgcttctgcgtctggctcgggagctgatgaggatgtagagagtccagagctgacaacaactcgaccacttccaaagatactgttgactagtgctgctccaaaagtggaaaccacgacgctgaatatacagaacaagatacctgctcagacaaagtcacctgaagaaactgataaagagaaagttcacctctctgactcagaaaggaaaatggacccagccgaagaggatacaaatgtgtatactgagaaacactcagacagtctgtttaaacggacagaa

SEQ ID NO: 4259 - DNA, 381 bp, Homo Sapiens
gagtcgatccgagagactgaggtcatcgacccccaggacctcctagaaggccgatacttctccggagccctaccagacgatgaggatgtagtggggcccgggcaggaatctgatgactttgagctgtctggctctggagatctggatgacttggaagactccatgatcggccctgaagttgtccatcccttggtgcctctagataaccatatccctgagagggcagggtctgggagccaagtccccaccgaacccaagaaactagaggagaatgaggttatccccaagagaatctcacccgttgaagagagtgaggatgtgtccaacaaggtgtcaatgtccagcactgtgcagggcagcaacatctttgagagaacggag

SEQ ID NO: 4260 - DNA, 4593 bp, Homo Sapiens
cctaacatcaccagaggccccctggacagcacggtgatcgatggcatgtcagtggtgctagcatgtgagacctcgggggcgccccgaccagctatcacttggcagaaaggggagcgcatcttggccagtggctctgtgcagctgcctcgcttcacacccctggagtcgggcagcctcctcatcagccccacacacatctccgatgcggggacctacacctgcctggccaccaactctcggggggtcgatgaggcctcagcagacctagtcgtttgggctcggacccgcatcaccaagcccccccaggatcagagtgtcatcaagggcacccaggcctccatggtgtgcggagtgacccacgacccccgagtaaccatcaggtacatctgggagaaggacggggccaccctgggcacggagagccatcctcgtatccgcctggacagaaacggctccctgcacatctcacagacgtggtcgggagacatcggcacgtacacctgccgggtgatctcagcaggaggcaacgactctcgcagtgcccacctgcgagtcaggcaactgccccacgcgcccgagcacccagtggccactctcagcaccgtggaaaggcgagccatcaacctgacgtggaccaagccctttgatggcaacagccccctgatccgctacattctggagatgtcggagaacaatgccccctggactgtactcctggccagtgtggaccccaaagctacctcagtgacagtcaagggcctggttcctgcacgctcctaccagttccgtctttgtgccgtcaacgacgtggggaaaggacagttcagcaaagacaccgagagggtctccctccccgaggagccccccacggcccctccacagaacgtcatcgccagcggtcgaaccaaccagtccatcatgatccagtggcagccgcctcctgagagccaccagaatggaattctcaagggttacatcatcaggtactgcctggccgggctgcccgtggggtaccagtttaagaacatcacggatgctgatgtgaacaacctgctgctggaggatctcatcatttggaccaactacgagatcgaggtggctgcttacaacagcgctgggctgggggtctacagcagtaaagtcaccgagtggacgctgcagggagttcccacagtccctccgggcaatgtgcacgcggaagccaccaattccacgaccatccgcttcacctggaacgcccccagcccccagttcatcaacggcatcaaccagggctacaagctgatcgcctgggagccggaacaggaagaggaggttaccatggtgaccgcccggcctaactttcaagacagcatccacgtgggcttcgtgtctggcctgaagaagttcaccgagtacttcacctcagtgctgtgtttcaccacccccggggacgggccacgcagcaccccgcagctggtgcgcacccatgaggatgtgcctgggcccgtgggacacctgagcttcagtgagatcctggacacatcgctgaaggtcagctggcaagagccgggagagaaaaatggcatcctcacagggtaccggatctcctgggaggagtacaatcgaaccaacacccgtgtgacccactacctgcccaacgtgaccctggagtaccgtgtcacgggcctcaccgcgctcaccacctacaccatcgaggtggccgccatgacctcaaagggccagggccaagtgtccgcctccaccatctcctctggggtgcccccagaactcccagggccccccaccaacctgggcatttccaacatcggcccccgctctgtgaccttgcagttcaggccaggctacgatgggaaaacctccatctcccgctggctggtggaagcccaggtaggcgtggttggggagggagaggagtggttgctgatccaccagctctccaatgagcccgatgcccgctccatggaggtgcccgacctcaaccccttcacctgctacagcttccgcatgcgccaggtgaacatcgtgggcaccagcccccccagtcagccttctagaaagatccagaccctgcaggcaccccctgacatggccccagccaatgtgtctctgcgcacagccagtgagaccagcctgtggctgcgctggatgcctctcccggagatggaatacaatgggaaccctgagtccgtgggctataagatcaagtacagccggtcagacgggcatggcaagacgctgagccacgtggtgcaggaccgtgtggagcgggactacaccatcgaggacctggaggagtggacagagtaccgcgtccaggtccaggccttcaacgccatcgggagcgggccctggagccagacggtggtgggcaggacccgggagtcagttccctcttccggccccaccaatgtgtctgcactggccaccacctccagcagcatgctggtgcgctggagcgaggtccccgaggctgatcgcaacgggctcgtgctgggctataaggtgatgtataaggagaaggactcggacacccagccccgattctggctggtggaaggcaactcatctcgcagtgcccagctcaccggcttgggcaaatacgtgctctatgaagtccaggtgctggccttcacacgcatcggggacggcagccccagccaccctcccatcctggagcggacgctggatgatgtcccaggaccacccatgggcatcctgttcccagaggtgcggaccacgtctgtgcggctgatctggcagccccctgccgcccccaatggcatcattcttgcttaccagatcacacaccggctcaacaccaccacggccaacaccgccactgtggaggtgctggcacccagcgcccggcagtacacagccacgggcctcaagccagagtctgtctacctgttccgcatcacggcccagacccgcaagggctggggagaagctgccgaggccttggtggtgaccaccgagaagagagaccgtccgcagccccccagcaggccaatggtgcagcaggaggatgtgagagcacgcagcgtgctgctgtcctgggagccagggagcgacgggctctcccctgtgcgctactacaccatccagacccgcgagctgcccagcggcaggtgggcactgcactcggcctctgtgagccacaatgcctccagcttcattgtggacaggctgaagcccttcacgtcctacaagttccgagtgaaggcgaccaatgacattggcgacagcgagttcagcgaggagtcggagtcactgaccaccctgcaggctgcccccgatgaagcacccaccatcctctccgtgacgccccacaccaccacctccgtgctaatccgatggcagccgccagcagaggacaagatcaatggcatcctcctgggcttccggatccgataccgggagctgctctatgaaggactgaggggcttcatgcttcgaggcatcaacaacccaggggccacatgggctgagcttacctccatgtactccatgcggaacctgagccggcccagcctcacgcagtacgagctggacaacctgaacaagcacaggcggtacgagatacggatgagcgtgtacaacgctgtgggtgaggggccctccagccccccgcaggaggtctttgttggggaggcagtgcccacagcagcacctcgtaacgtggtcgtccacggcgccacggccacacagctggacgtgacttgggagccacctccgctggacagccagaatggagacatccaggggtacaagatttatttctgggaagcccagcgggggaacctcacagagcgagtgaagacgcttttcctggctgagaacagcgtgaagctcaagaacttgactggctacacggcctacatggtcagcgtggccgccttcaacgccgctggggatgggcctcggagtacccccacccaaggccagacccagcaagcagcccccagcgctcccagctcggtcaagttcagtgagctgaccacaacctcagtgaatgtgtcctgggaagccccgcagttccccaatggcatcctggagggctacaggctggtgtacgagccctgcagccccgtggatggagtcagcaagatcgtgaccgtggacgtgaaggggaacagccccctgtggctgaaggtgaaggacctggcggagggggtgacctacaggttccgcatcagagccaagaccttcacctacgggccggagatcgaagccaacgtcaccacgggccccggagaaggtgccccaggaccgcctggcgtgcccatcatcgtgcggtacagctctgccatcgccattcactggtccagcggagacccgggcaaagggcccatcacccgctacgtcatcgaggccagaccttcagacgagggactatgggacatcctcatcaaagacatccccaaggaggtgagctcctacacgttcagcatggacatcctgaagccgggcgtgagctatgacttccgggtcatcgcggtcaacgactatggtttcggcacccccagcagcccctcccagtctgtgccagcccagaaagccaaccccttctatgaggagtggtggttc

SEQ ID NO: 4261 - DNA, 351 bp, Homo Sapiens
cagaatgaaggctgggacagccccatctgcacagagggggtagtctctgtgtcttggggcgagaacaccgtcatgtcctgcaacatctccaacgccttctcccatgtcaacatcaagctgcgtgcccacgggcaggagagcgccatcttcaatgaggtggctccaggctacttctcccgggacggctggcagctccaggttcagggaggcgtggcacagctggtgatcaaaggcgcccgggactcccatgctgggctgtacatgtggcacctcgtgggacaccagagaaataacagacaagtcacgctggaggtttcaggtgcagaaccccagtccgcccctgacactggg

SEQ ID NO: 4262 - DNA, 1605 bp, Homo Sapiens
tggtcttacaacacctccacggaagctatgacttatgatgaggccagtgcttattgtcagcaaaggtacacacacctggttgcaattcaaaacaaagaagagattgagtacctaaactccatattgagctattcaccaagttattactggattggaatcagaaaagtcaacaatgtgtgggtctgggtaggaacccagaaacctctgacagaagaagccaagaactgggctccaggtgaacccaacaataggcaaaaagatgaggactgcgtggagatctacatcaagagagaaaaagatgtgggcatgtggaatgatgagaggtgcagcaagaagaagcttgccctatgctacacagctgcctgtaccaatacatcctgcagtggccacggtgaatgtgtagagaccatcaataattacacttgcaagtgtgaccctggcttcagtggactcaagtgtgagcaaattgtgaactgtacagccctggaatcccctgagcatggaagcctggtttgcagtcacccactgggaaacttcagctacaattcttcctgctctatcagctgtgataggggttacctgccaagcagcatggagaccatgcagtgtatgtcctctggagaatggagtgctcctattccagcctgcaatgtggttgagtgtgatgctgtgacaaatccagccaatgggttcgtggaatgtttccaaaaccctggaagcttcccatggaacacaacctgtacatttgactgtgaagaaggatttgaactaatgggagcccagagccttcagtgtacctcatctgggaattgggacaacgagaagccaacgtgtaaagctgtgacatgcagggccgtccgccagcctcagaatggctctgtgaggtgcagccattcccctgctggagagttcaccttcaaatcatcctgcaacttcacctgtgaggaaggcttcatgttgcagggaccagcccaggttgaatgcaccactcaagggcagtggacacagcaaatcccagtttgtgaagctttccagtgcacagccttgtccaaccccgagcgaggctacatgaattgtcttcctagtgcttctggcagtttccgttatgggtccagctgtgagttctcctgtgagcagggttttgtgttgaagggatccaaaaggctccaatgtggccccacaggggagtgggacaacgagaagcccacatgtgaagctgtgagatgcgatgctgtccaccagcccccgaagggtttggtgaggtgtgctcattcccctattggagaattcacctacaagtcctcttgtgccttcagctgtgaggagggatttgaattacatggatcaactcaacttgagtgcacatctcagggacaatggacagaagaggttccttcctgccaagtggtaaaatgttcaagcctggcagttccgggaaagatcaacatgagctgcagtggggagcccgtgtttggcactgtgtgcaagttcgcctgtcctgaaggatggacgctcaatggctctgcagctcggacatgtggagccacaggacactggtctggcctgctacctacctgtgaagctcccactgagtccaacattccc

SEQ ID NO: 4263 - DNA, 882 bp, Homo Sapiens
tggacttaccattattctgaaaaacccatgaactggcaaagggctagaagattctgccgagacaattacacagatttagttgccatacaaaacaaggcggaaattgagtatctggagaagactctgcctttcagtcgttcttactactggataggaatccggaagataggaggaatatggacgtgggtgggaaccaacaaatctcttactgaagaagcagagaactggggagatggtgagcccaacaacaagaagaacaaggaggactgcgtggagatctatatcaagagaaacaaagatgcaggcaaatggaacgatgacgcctgccacaaactaaaggcagccctctgttacacagcttcttgccagccctggtcatgcagtggccatggagaatgtgtagaaatcatcaataattacacctgcaactgtgatgtggggtactatgggccccagtgtcagtttgtgattcagtgtgagcctttggaggccccagagctgggtaccatggactgtactcaccctttgggaaacttcagcttcagctcacagtgtgccttcagctgctctgaaggaacaaacttaactgggattgaagaaaccacctgtggaccatttggaaactggtcatctccagaaccaacctgtcaagtgattcagtgtgagcctctatcagcaccagatttggggatcatgaactgtagccatcccctggccagcttcagctttacctctgcatgtaccttcatctgctcagaaggaactgagttaattgggaagaagaaaaccatttgtgaatcatctggaatctggtcaaatcctagtccaatatgtcaaaaattggacaaaagtttctcaatgattaaggagggtgattataac

SEQ ID NO: 4264 - DNA, 2187 bp, Homo Sapiens
tggacttatcattacagcacaaaagcatactcatggaatatttcccgtaaatactgccagaatcgctacacagacttagtggccatccagaataaaaatgaaattgattacctcaataaggtcctaccctactacagctcctactactggattgggatccgaaagaacaataagacatggacatgggtgggaaccaaaaaggctctcaccaacgaggctgagaactgggctgataatgaacctaacaacaaaaggaacaacgaggactgcgtggagatatacatcaagagtccgtcagcccctggcaagtggaatgatgagcactgcttgaagaaaaagcacgcattgtgttacacagcctcctgccaggacatgtcctgcagcaaacaaggagagtgcctcgagaccatcgggaactacacctgctcctgttaccctggattctatgggccagaatgtgaatacgtgagagagtgtggagaacttgagctccctcaacacgtgctcatgaactgcagccaccctctgggaaacttctcttttaactcgcagtgcagcttccactgcactgacgggtaccaagtaaatgggcccagcaagctggaatgcttggcttctggaatctggacaaataagcctccacagtgtttagctgcccagtgcccacccctgaagattcctgaacgaggaaacatgacctgccttcattctgcaaaagcattccagcatcagtctagctgcagcttcagttgtgaagagggatttgcattagttggaccggaagtggtgcaatgcacagcctcgggggtatggacagccccagccccagtgtgtaaagctgtgcagtgtcagcacctggaagcccccagtgaaggaaccatggactgtgttcatccgctcactgcttttgcctatggctccagctgtaaatttgagtgccagcccggctacagagtgaggggcttggacatgctccgctgcattgactctggacactggtctgcacccttgccaacctgtgaggctatttcgtgtgagccgctggagagtcctgtccacggaagcatggattgctctccatccttgagagcgtttcagtatgacaccaactgtagcttccgctgtgctgaaggtttcatgctgagaggagccgatatagttcggtgtgataacttgggacagtggacagcaccagccccagtctgtcaagctttgcagtgccaggatctcccagttccaaatgaggcccgggtgaactgctcccaccccttcggtgcctttaggtaccagtcagtctgcagcttcacctgcaatgaaggcttgctcctggtgggagcaagtgtgctacagtgcttggctactggaaactggaattctgttcctccagaatgccaagccattccctgcacacctttgctaagccctcagaatggaacaatgacctgtgttcgacctcttggaagttccagttataaatccacatgtcaattcatctgtgacgagggatattctttgtctggaccagaaagattggattgtactcgatcgggacgctggacagactccccaccaatgtgtgaagccatcaagtgcccagaactctttgccccagagcagggcagcctggattgttctgacactcgtggagaattcaatgttggctccacctgccatttctcttgtaacaacggctttaagctggaggggcccaataatgtggaatgcacaacttctggaagatggtcagctactccaccaacctgcaaaggcatagcatcacttcctactccaggggtgcaatgtccagccctcaccactcctgggcagggaaccatgtactgtaggcatcatccgggaacctttggttttaataccacttgttactttggctgcaacgctggattcacactcataggagacagcactctcagctgcagaccttcaggacaatggacagcagtaactccagcatgcagagctgtgaaatgctcagaactacatgttaataagccaatagcgatgaactgctccaacctctggggaaacttcagttatggatcaatctgctctttccattgtctagagggccagttacttaatggctctgcacaaacagcatgccaagagaatggccactggtcaactaccgtgccaacctgccaaggaccattgactatccaggaagcc

SEQ ID NO: 4265 - DNA, 2253 bp, Homo Sapiens
aactatcagaatgggaagaacaatgtgccaaggctgaaattatcctacaaagaaatgttggaatccaacaatgtgatcactttcaatggcttggccaacagctccagttatcataccttccttttggatgaggaacggagtaggctgtatgttggagcaaaggatcacatattttcattcgacctggttaatatcaaggattttcaaaagattgtgtggccagtatcttacaccagaagagatgaatgcaagtgggctggaaaagacatcctgaaagaatgtgctaatttcatcaaggtacttaaggcatataatcagactcacttgtacgcctgtggaacgggggcttttcatccaatttgcacctacattgaaattggacatcatcctgaggacaatatttttaagctggagaactcacattttgaaaacggccgtgggaagagtccatatgaccctaagctgctgacagcatcccttttaatagatggagaattatactctggaactgcagctgattttatggggcgagactttgctatcttccgaactcttgggcaccaccacccaatcaggacagagcagcatgattccaggtggctcaatgatccaaagttcattagtgcccacctcatctcagagagtgacaatcctgaagatgacaaagtatactttttcttccgtgaaaatgcaatagatggagaacactctggaaaagctactcacgctagaataggtcagatatgcaagaatgactttggagggcacagaagtctggtgaataaatggacaacattcctcaaagctcgtctgatttgctcagtgccaggtccaaatggcattgacactcattttgatgaactgcaggatgtattcctaatgaactttaaagatcctaaaaatccagttgtatatggagtgtttacgacttccagtaacattttcaagggatcagccgtgtgtatgtatagcatgagtgatgtgagaagggtgttccttggtccatatgcccacagggatggacccaactatcaatgggtgccttatcaaggaagagtcccctatccacggccaggaacttgtcccagcaaaacatttggtggttttgactctacaaaggaccttcctgatgatgttataacctttgcaagaagtcatccagccatgtacaatccagtgtttcctatgaacaatcgcccaatagtgatcaaaacggatgtaaattatcaatttacacaaattgtcgtagaccgagtggatgcagaagatggacagtatgatgttatgtttatcggaacagatgttgggaccgttcttaaagtagtttcaattcctaaggagacttggtatgatttagaagaggttctgctggaagaaatgacagtttttcgggaaccgactgctatttcagcaatggagctttccactaagcagcaacaactatatattggttcaacggctggggttgcccagctccctttacaccggtgtgatatttacgggaaagcgtgtgctgagtgttgcctcgcccgagacccttactgtgcttgggatggttctgcatgttctcgctattttcccactgcaaagagacgcacaagacgacaagatataagaaatggagacccactgactcactgttcagacttacaccatgataatcaccatggccacagccctgaagagagaatcatctatggtgtagagaatagtagcacatttttggaatgcagtccgaagtcgcagagagcgctggtctattggcaattccagaggcgaaatgaagagcgaaaagaagagatcagagtggatgatcatatcatcaggacagatcaaggccttctgctacgtagtctacaacagaaggattcaggcaattacctctgccatgcggtggaacatgggttcatacaaactcttcttaaggtaaccctggaagtcattgacacagagcatttggaagaacttcttcataaagatgatgatggagatggctctaagaccaaagaaatgtccaatagcatgacacctagccagaaggtctggtacagagacttcatgcagctcatcaaccaccccaatctcaacacgatggatgagttctgtgaacaagtttggaaaagggaccgaaaacaacgtcggcaaaggccaggacataccccagggaacagtaacaaatggaagcacttacaagaaaataagaaaggtagaaacaggaggacccacgaatttgagagggcacccaggagtgtc

SEQ ID NO: 4266 - DNA, 2172 bp, Homo Sapiens
gcccccagccccccacgccttcggctctccttccaagagctccaggcctggcatggtctccagactttcagcctggagcgaacctgctgctaccaggccttgctggtggatgaggagcgtggacgcctgtttgtgggtgccgagaaccatgtggcctccctcaacctggacaacatcagcaagcgggccaagaagctggcctggccggcccctgtggaatggcgagaggagtgcaactgggcagggaaggacattggtactgagtgcatgaacttcgtgaagttgctgcatgcctacaaccgcacccatttgctggcctgtggcacgggagccttccacccaacctgtgcctttgtggaagtgggccaccgggcagaggagcccgtcctccggctggacccaggaaggatagaggatggcaaggggaagagtccttatgaccccaggcatcgggctgcctccgtgctggtgggggaggagctatactcaggggtggcagcagacctcatgggacgagactttaccatctttcgcagcctagggcaacgtccaagtctccgaacagagccacacgactcccgctggctcaatgagcccaagtttgtcaaggtattttggatcccggagagcgagaacccagacgacgacaaaatctacttcttctttcgtgagacggcggtagaggcggcgccggcactgggacgcctgtccgtgtcccgcgttggccagatctgccggaacgacgtgggcggccagcgcagcctggtcaacaagtggacgacgttcctgaaggcgcggctggtgtgctcggtgcccggcgtcgagggcgacacccacttcgatcagctccaggatgtgtttctgttgtcctcgcgggaccaccggaccccgctgctctatgccgtcttctccacgtccagcatcttccagggctctgcggtgtgcgtgtacagcatgaacgacgtgcgccgggccttcttgggaccctttgcacacaaggaggggcccatgcaccagtgggtgtcataccagggtcgcgtcccctacccgcggccaggcatgtgccccagcaagacctttggcaccttcagttccaccaaggacttcccagacgatgtcatccagtttgcgcggaaccaccccctcatgtacaactctgtcctgcccactggggggcgccctcttttcctacaagttggagccaattacaccttcactcaaattgccgcggaccgggttgcagccgctgacggacactatgacgtcctcttcattggcacagacgttggcacggtgctgaaggtgatctcggtccccaagggcagtaggcccagcgcagaggggctgctcctggaggagctgcacgtgtttgaggactcggccgctgtcaccagcatgcaaatttcttccaagaggcaccagctgtacgtagcctcgcggagcgcggtggcccagatcgcgttgcaccgctgcgctgcccacggccgcgtctgcaccgaatgctgtctggcgcgtgacccctactgcgcctgggacggggtcgcgtgcacgcgcttccagcccagtgccaagaggcggttccggcggcaagacgtaaggaatggcgaccccagcacgttgtgctccggagactcgtctcgtcccgcgctgctggaacacaaggtgttcggcgtggagggcagcagcgcctttctggagtgtgagccccgctcgctgcaggcgcgcgtggagtggactttccagcgcgcaggggtgacagcccacacccaggtgctggcagaggagcgcaccgagcgcaccgcccggggactactgctgcgcaggctgcggcgccgggactcgggcgtgtacttgtgcgccgccgtcgagcagggctttacgcaaccgctgcgtcgcctgtcgctgcacgtgttgagtgctacgcaggccgaacgactggcgcgggccgaggaggctgcgcccgccgcgccgccgggccccaaactctggtaccgggactttctgcagctggtggagccgggcggaggtggcagcgcgaactccctgcgcatgtgccgcccgcagcctgcgctgcagtcactgcccctggagtcgcggagaaagggccgtaaccggaggacccacgcccctgagcctcgcgctgagcgggggccgcgcagcgcaacgcactgg

SEQ ID NO: 4267 - DNA, 2193 bp, Homo Sapiens
ggatcttcccagccccaagcaagagtttatttaacatttgatgaacttcgagaaaccaagacctctgaatacttcagcctttcccaccatcctttagactacaggattttattaatggatgaagatcaggaccggatatatgtgggaagcaaagatcacattctttccctgaatattaacaatataagtcaagaagctttgagtgttttctggccagcatctacaatcaaagttgaagaatgcaaaatggctggcaaagatcccacacacggctgtgggaactttgtccgtgtaattcagactttcaatcgcacacatttgtatgtctgtgggagtggcgctttcagtcctgtctgtacttacttgaacagagggaggagatcagaggaccaagttttcatgattgactccaagtgtgaatctggaaaaggacgctgctctttcaaccccaacgtgaacacggtgtctgttatgatcaatgaggagcttttctctggaatgtatatagatttcatggggacagatgctgctatttttcgaagtttaaccaagaggaatgcggtcagaactgatcaacataattccaaatggctaagtgaacctatgtttgtagatgcacatgtcatcccagatggtactgatccaaatgatgctaaggtgtacttcttcttcaaagaaaaactgactgacaataacaggagcacgaaacagattcattccatgattgctcgaatatgtcctaatgacactggtggactgcgtagccttgtcaacaagtggaccactttcttaaaggcgaggctggtgtgctcggtaacagatgaagacggcccagaaacacactttgatgaattagaggatgtgtttctgctggaaactgataacccgaggacaacactagtgtatggcatttttacaacatcaagctcagttttcaaaggatcagccgtgtgtgtgtatcatttatctgatatacagactgtgtttaatgggccttttgcccacaaagaagggcccaatcatcagctgatttcctatcagggcagaattccatatcctcgccctggaacttgtccaggaggagcatttacacccaatatgcgaaccaccaaggagttcccagatgatgttgtcacttttattcggaaccatcctctcatgtacaattccatctacccaatccacaaaaggcctttgattgttcgtattggcactgactacaagtacacaaagatagctgtggatcgagtgaacgctgctgatgggagataccatgtcctgtttctcggaacagatcggggtactgtgcaaaaagtggttgttcttcctactaacaactctgtcagtggcgagctcattctggaggagctggaagtctttaagaatcatgctcctataacaacaatgaaaatttcatctaaaaagcaacagttgtatgtgagttccaatgaaggggtttcccaggtatctctgcaccgctgccacatctatggtacagcctgtgctgactgctgcctggcgcgggacccttattgcgcctgggatggccattcctgttccagattctacccaactgggaaacggaggagccgaagacaagatgtgagacatggaaacccactgactcaatgcagaggatttaatctaaaagcatacagaaatgcagctgaaattgtgcagtatggagtaaaaaataacaccacttttctggagtgtgcccccaagtctccgcaggcatctatcaagtggctgttacagaaagacaaagacaggaggaaagaggttaagctgaatgaacgaataatagccacttcacagggactcctgatccgctctgttcagggttctgaccaaggactttatcactgcattgctacagaaaatagtttcaagcagaccatagccaagatcaacttcaaagttttagattcagaaatggtggctgttgtgacggacaaatggtccccgtggacctgggccagctctgtgagggctttacccttccacccgaaggacatcatgggggcattcagccactcagaaatgcagatgattaaccaatactgcaaagacactcggcagcaacatcagcagggagatgaatcacagaaaatgagaggggactatggcaagttaaaggccctcatcaatagtcggaaaagtagaaacaggaggaatcagttgccagagtca

SEQ ID NO: 4268 - DNA, 735 bp, Homo Sapiens
agatgcgacacttatgggaaagcttgcgcagactgttgtcttgccagagacccctactgtgcctgggatggaaatgcatgctctcgatatgctcctacttctaaaaggagagctagacgccaagatgtaaaatatggcgacccaatcacccagtgctgggacatcgaagacagcattagtcatgaaactgctgatgaaaaggtgatttttggcattgaatttaactcaacctttctggaatgtatacctaaatcccaacaagcaactattaaatggtatatccagaggtcaggggatgagcatcgagaggagttgaagcccgatgaaagaatcatcaaaacggaatatgggctactgattcgaagtttgcagaagaaggattctgggatgtattactgcaaagcccaggagcacactttcatccacaccatagtgaagctgactttgaatgtcattgagaatgaacagatggaaaatacccagagggcagagcatgaggaggggaaggtcaaggatctattggctgagtcacggttgagatacaaagactacatccaaatccttagcagcccaaacttcagcctcgaccagtactgcgaacagatgtggcacagggagaagcggagacagagaaacaaggggggcccaaagtggaagcacatgcaggaaatgaagaagaaacgaaatcgaagacatcacagagacctggatgagctccctagagctgtagccacg

SEQ ID NO: 4269 - DNA, 2250 bp, Homo Sapiens
gctgatactacccacccccggttacgcctgtcacataaagagctcttgaatctgaacagaacatcaatatttcatagcccttttggatttcttgatctccatacaatgctgctggatgaatatcaagagaggctcttcgtgggaggcagggaccttgtatattccctcagcttggagagaatcagtgacggctataaagagatacactggccgagtacagctctaaaaatggaagaatgcataatgaagggaaaagatgcgggtgaatgtgcaaattatgttcgggttttgcatcactataacaggacacaccttctgacctgtggtactggagcttttgatccagtttgtgccttcatcagagttggatatcatttggaggatcctctgtttcacctggaatcacccagatctgagagaggaaggggcagatgtccttttgaccccagctcctccttcatctccactttaattggtagtgaattgtttgctggactctacagtgactactggagcagagacgctgcgatcttccgcagcatggggcgactggcccatatccgcactgagcatgacgatgagcgtctgttgaaagaaccaaaatttgtaggttcatacatgattcctgacaatgaagacagagatgacaacaaagtatatttcttttttactgagaaggcactggaggcagaaaacaatgctcacgcaatttacaccagggtcgggcgactctgtgtgaatgatgtaggagggcagagaatactggtgaataagtggagcactttcctaaaagcgagactcgtttgctcagtaccaggaatgaatggaattgacacatattttgatgaattagaggacgtttttttgctacctaccagagatcataagaatccagtgatatttggactctttaacactaccagtaatatttttcgagggcatgctatatgtgtctatcacatgtctagcattcgggcagccttcaacggaccatatgcacataaggaaggacctgaataccactggtcagtctatgaaggaaaagtcccttatccaaggcctggttcttgtgccagcaaagtaaatggagggagatacggaaccaccaaggactatcctgatgatgccatccgatttgcaagaagtcatccactaatgtaccaggccataaaacctgcccataaaaaaccaatattggtaaaaacagatggaaaatataacctgaaacaaatagcagtagatcgagtggaagctgaggatggccaatatgacgtcttgtttattgggacagataatggaattgtgctgaaagtaatcacaatttacaaccaagaaatggaatcaatggaagaagtaattctagaagaacttcagatattcaaggatccagttcctattatttctatggagatttcttcaaaacggcaacagctgtatattggatctgcttctgctgtggctcaagtcagattccatcactgtgacatgtatggaagtgcttgtgctgactgctgcctggctcgagacccttactgtgcctgggatggcatatcctgctcccggtattacccaacaggcacacatgcaaaaaggcgtttccggagacaagatgttcgacatggaaatgcagctcagcagtgctttggacaacagtttgttggggatgctttggataagactgaagaacatctggcttatggcatagagaacaacagtactttgctggaatgtaccccacgatctttacaagcgaaagttatctggtttgtacagaaaggacgtgagacaagaaaagaggaggtgaagacagatgacagagtggttaagatggaccttggtttactcttcctaaggttacacaaatcagatgctgggacctatttttgccagacagtagagcatagctttgtccatacggtccgtaaaatcaccttggaggtagtggaagaggagaaagtcgaggatatgtttaacaaggacgatgaggaggacaggcatcacaggatgccttgtcctgctcagagtagcatctcgcagggagcaaaaccatggtacaaggaattcttgcagctgatcggttatagcaacttccagagagtggaagaatactgcgagaaagtatggtgcacagatagaaagaggaaaaagcttaaaatgtcaccctccaagtggaagtatgccaaccctcaggaaaagaagctccgttccaaacctgagcattaccgcctgcccaggcacacgctggactcc

SEQ ID NO: 4270 - DNA, 2301 bp, Homo Sapiens
tccttccccacccaggaccacctcccggccacgccccgggtccggctctcattcaaagagctgaaggccacaggcaccgcccacttcttcaacttcctgctcaacacaaccgactaccgaatcttgctcaaggacgaggaccacgaccgcatgtacgtgggcagcaaggactacgtgctgtccctggacctgcacgacatcaaccgcgagcccctcattatacactgggcagcctccccacagcgcatcgaggaatgcgtgctctcaggcaaggatgtcaacggcgagtgtgggaacttcgtcaggctcatccagccctggaaccgaacacacctgtatgtgtgcgggacaggtgcctacaaccccatgtgcacctatgtgaaccgcggacgccgcgcccaggccacaccatggacccagactcaggcggtcagaggccgcggcagcagagccacggatggtgccctccgcccgatgcccacagccccacgccaggattacatcttctacctggagcctgagcgactcgagtcagggaagggcaagtgtccgtacgatcccaagctggacacagcatcggccctcatcaatgaggagctctatgctggtgtgtacatcgattttatgggcactgatgcagccatcttccgcacacttggaaagcagacagccatgcgcacggatcagtacaactcccggtggctgaacgacccgtcgttcatccatgctgagctcattcctgacagtgcggagcgcaatgatgataagctttacttcttcttccgtgagcggtcggcagaggcgccgcagagccccgcggtgtacgcccgcatcgggcgcatttgcctgaacgatgacggtggtcactgttgcctggtcaacaagtggagcacattcctgaaggcgcggctcgtctgctctgtcccgggcgaggatggcattgagactcactttgatgagctccaggacgtgtttgtccagcagacccaggacgtgaggaaccctgtcatttacgctgtctttacctcctctggctccgtgttccgaggctctgccgtgtgtgtctactccatggctgatattcgcatggtcttcaacgggccctttgcccacaaagaggggcccaactaccagtggatgcccttctcagggaagatgccctacccacggccgggcacgtgccctggtggaaccttcacgccatctatgaagtccaccaaggattatcctgatgaggtgatcaacttcatgcgcagccacccactcatgtaccaggccgtgtaccctctgcagcggcggcccctggtagtccgcacaggtgctccctaccgccttaccactattgccgtggaccaggtggatgcagccgacgggcgctatgaggtgcttttcctgggcacagaccgcgggacagtgcagaaggtcattgtgctgcccaaggatgaccaggagatggaggagctcatgctggaggaggtggaggtcttcaaggatccagcacccgtcaagaccatgaccatctcttctaagaggcaacaactctacgtggcgtcagccgtgggtgtcacacacctgagcctgcaccgctgccaggcgtatggggctgcctgtgctgactgctgccttgcccgggacccttactgtgcctgggatggccaggcctgctcccgctatacagcatcctccaagaggcggagccgccggcaggacgtccggcacggaaaccccatcaggcagtgccgtgggttcaactccaatgccaacaagaatgccgtggagtctgtgcagtatggcgtggccggcagcgcagccttccttgagtgccagccccgctcgccccaagccactgttaagtggctgttccagcgagatcctggtgaccggcgccgagagattcgtgcagaggaccgcttcctgcgcacagagcagggcttgttgctccgtgcactgcagctcagcgatcgtggcctctactcctgcacagccactgagaacaactttaagcacgtcgtcacacgagtgcagctgcatgtactgggccgggacgccgtccatgctgccctcttcccaccactgtccatgagcgccccgccacccccaggcgcaggccccccaacgcctccttaccaggagttagcccagctgctggcccagccagaagtgggcctcatccaccagtactgccagggttactggcgccatgtgccccccagccccagggaggctccaggggcaccccggtctcctgagccccaggaccagaaaaagccccggaaccgccggcaccaccctccggacaca

SEQ ID NO: 4271 - DNA, 2280 bp, Homo Sapiens
ggccccagccccggccccagtgtgccccgcctgcggctctcctaccgagacctcctgtctgccaaccgctctgccatctttctgggcccccagggctccctgaacctccaggccatgtacctagatgagtaccgagaccgcctctttctgggtggcctggacgccctctactctctgcggctggaccaggcatggccagatccccgggaggtcctgtggccaccgcagccaggacagagggaggagtgtgttcgaaagggaagagatcctttgacagagtgcgccaacttcgtgcgggtgctacagcctcacaaccggacccacctgctagcctgtggcactggggccttccagcccacctgtgccctcatcacagttggccaccgtggggagcatgtgctccacctggagcctggcagtgtggaaagtggccgggggcggtgccctcacgagcccagccgtccctttgccagcaccttcatagacggggagctgtacacgggtctcactgctgacttcctggggcgagaggccatgatcttccgaagtggaggtcctcggccagctctgcgttccgactctgaccagagtctcttgcacgacccccggtttgtgatggccgcccggatccctgagaactctgaccaggacaatgacaaggtgtacttcttcttctcggagacggtcccctcgcccgatggtggctcgaaccatgtcactgtcagccgcgtgggccgcgtctgcgtgaatgatgctgggggccagcgggtgctggtgaacaaatggagcactttcctcaaggccaggctggtctgctcggtgcccggccctggtggtgccgagacccactttgaccagctagaggatgtgttcctgctgtggcccaaggccgggaagagcctcgaggtgtacgcgctgttcagcaccgtcagtgccgtgttccagggcttcgccgtctgtgtgtaccacatggcagacatctgggaggttttcaacgggccctttgcccaccgagatgggcctcagcaccagtgggggccctatgggggcaaggtgcccttccctcgccctggcgtgtgccccagcaagatgaccgcacagccaggacggccttttggcagcaccaaggactacccagatgaggtgctgcagtttgcccgagcccaccccctcatgttctggcctgtgcggcctcgacatggccgccctgtccttgtcaagacccacctggcccagcagctacaccagatcgtggtggaccgcgtggaggcagaggatgggacctacgatgtcattttcctggggactgactcagggtctgtgctcaaagtcatcgctctccaggcagggggctcagctgaacctgaggaagtggttctggaggagctccaggtgtttaaggtgccaacacctatcaccgaaatggagatctctgtcaaaaggcaaatgctatacgtgggctctcggctgggtgtggcccagctgcggctgcaccaatgtgagacttacggcactgcctgtgcagagtgctgcctggcccgggacccatactgtgcctgggatggtgcctcctgtacccactaccgccccagccttggcaagcgccggttccgccggcaggacatccggcacggcaaccctgccctgcagtgcctgggccagagccaggaagaagaggcagtgggacttgtggcagccaccatggtctacggcacggagcacaatagcaccttcctggagtgcctgcccaagtctccccaggctgctgtgcgctggctcttgcagaggccaggggatgaggggcctgaccaggtgaagacggacgagcgagtcttgcacacggagcgggggctgctgttccgcaggcttagccgtttcgatgcgggcacctacacctgcaccactctggagcatggcttctcccagactgtggtccgcctggctctggtggtgattgtggcctcacagctggacaacctgttccctccggagccaaagccagaggagcccccagcccggggaggcctggcttccaccccacccaaggcctggtacaaggacatcctgcagctcattggcttcgccaacctgccccgggtggatgagtactgtgagcgcgtgtggtgcaggggcaccacggaatgctcaggctgcttccggagccggagccggggcaagcaggccaggggcaagagctgggcagggctggagctaggcaagaagatgaagagccgggtgcatgccgagcacaatcggacgccccgggaggtggaggccacg

SEQ ID NO: 4272 - DNA, 1953 bp, Homo Sapiens
ggaggcgggcaggggcccatgcccagggtcagatactatgcaggggatgaacgtagggcacttagcttcttccaccagaagggcctccaggattttgacactctgctcctgagtggtgatggaaatactctctacgtgggggctcgagaagccattctggccttggatatccaggatccaggggtccccaggctaaagaacatgataccgtggccagccagtgacagaaaaaagagtgaatgtgcctttaagaagaagagcaatgagacacagtgtttcaacttcatccgtgtcctggtttcttacaatgtcacccatctctacacctgcggcaccttcgccttcagccctgcttgtaccttcattgaacttcaagattcctacctgttgcccatctcggaggacaaggtcatggagggaaaaggccaaagcccctttgaccccgctcacaagcatacggctgtcttggtggatgggatgctctattctggtactatgaacaacttcctgggcagtgagcccatcctgatgcgcacactgggatcccagcctgtcctcaagaccgacaacttcctccgctggctgcatcatgacgcctcctttgtggcagccatcccttcgacccaggtcgtctacttcttcttcgaggagacagccagcgagtttgacttctttgagaggctccacacatcgcgggtggctagagtctgcaagaatgacgtgggcggcgaaaagctgctgcagaagaagtggaccaccttcctgaaggcccagctgctctgcacccagccggggcagctgcccttcaacgtcatccgccacgcggtcctgctccccgccgattctcccacagctccccacatctacgcagtcttcacctcccagtggcaggttggcgggaccaggagctctgcggtttgtgccttctctctcttggacattgaacgtgtctttaaggggaaatacaaagagttgaacaaagaaacttcacgctggactacttataggggccctgagaccaacccccggccaggcagttgctcagtgggcccctcctctgataaggccctgaccttcatgaaggaccatttcctgatggatgagcaagtggtggggacgcccctgctggtgaaatctggcgtggagtatacacggcttgcagtggagacagcccagggccttgatgggcacagccatcttgtcatgtacctgggaaccaccacagggtcgctccacaaggctgtggtaagtggggacagcagtgctcatctggtggaagagattcagctgttccctgaccctgaacctgttcgcaacctgcagctggcccccacccagggtgcagtgtttgtaggcttctcaggaggtgtctggagggtgccccgagccaactgtagtgtctatgagagctgtgtggactgtgtccttgcccgggacccccactgtgcctgggaccctgagtcccgaacctgttgcctcctgtctgcccccaacctgaactcctggaagcaggacatggagcgggggaacccagagtgggcatgtgccagtggccccatgagcaggagccttcggcctcagagccgcccgcaaatcattaaagaagtcctggctgtccctaactccatcctggagctcccctgcccccacctgtcagccttggcctcttattattggagtcatggcccagcagcagtcccagaagcctcttccactgtctacaatggctccctcttgctgatagtgcaggatggagttgggggtctctaccagtgctgggcaactgagaatggcttttcataccctgtgatctcctactgggtggacagccaggaccagaccctggccctggatcctgaactggcaggcatcccccgggagcatgtgaaggtcccgttgaccagggtcagtggtggggccgccctggctgcccagcagtcctactggccccac

SEQ ID NO: 4273 - DNA, 2022 bp, Homo Sapiens
ctcagcccccggatcagcctgcctctgggctctgaagagcggccattcctcagattcgaagctgaacacatctccaactacacagcccttctgctgagcagggatggcaggaccctgtacgtgggtgctcgagaggccctctttgcactcagtagcaacctcagcttcctgccaggcggggagtaccaggagctgctttggggtgcagacgcagagaagaaacagcagtgcagcttcaagggcaaggacccacagcgcgactgtcaaaactacatcaagatcctcctgccgctcagcggcagtcacctgttcacctgtggcacagcagccttcagccccatgtgtacctacatcaacatggagaacttcaccctggcaagggacgagaaggggaatgtcctcctggaagatggcaagggccgttgtcccttcgacccgaatttcaagtccactgccctggtggttgatggcgagctctacactggaacagtcagcagcttccaagggaatgacccggccatctcgcggagccaaagccttcgccccaccaagaccgagagctccctcaactggctgcaagacccagcttttgtggcctcagcctacattcctgagagcctgggcagcttgcaaggcgatgatgacaagatctactttttcttcagcgagactggccaggaatttgagttctttgagaacaccattgtgtcccgcattgcccgcatctgcaagggcgatgagggtggagagcgggtgctacagcagcgctggacctccttcctcaaggcccagctgctgtgctcacggcccgacgatggcttccccttcaacgtgctgcaggatgtcttcacgctgagccccagcccccaggactggcgtgacacccttttctatggggtcttcacttcccagtggcacaggggaactacagaaggctctgccgtctgtgtcttcacaatgaaggatgtgcagagagtcttcagcggcctctacaaggaggtgaaccgtgagacacagcagtggtacaccgtgacccacccggtgcccacaccccggcctggagcgtgcatcaccaacagtgcccgggaaaggaagatcaactcatccctgcagctcccagaccgcgtgctgaacttcctcaaggaccacttcctgatggacgggcaggtccgaagccgcatgctgctgctgcagccccaggctcgctaccagcgcgtggctgtacaccgcgtccctggcctgcaccacacctacgatgtcctcttcctgggcactggtgacggccggctccacaaggcagtgagcgtgggcccccgggtgcacatcattgaggagctgcagatcttctcatcgggacagcccgtgcagaatctgctcctggacacccacagggggctgctgtatgcggcctcacactcgggcgtagtccaggtgcccatggccaactgcagcctgtaccggagctgtggggactgcctcctcgcccgggacccctactgtgcttggagcggctccagctgcaagcacgtcagcctctaccagcctcagctggccaccaggccgtggatccaggacatcgagggagccagcgccaaggacctttgcagcgcgtcttcggttgtgtccccgtcttttgtaccaacaggggagaagccatgtgagcaagtccagttccagcccaacacagtgaacactttggcctgcccgctcctctccaacctggcgacccgactctggctacgcaacggggcccccgtcaatgcctcggcctcctgccacgtgctacccactggggacctgctgctggtgggcacccaacagctgggggagttccagtgctggtcactagaggagggcttccagcagctggtagccagctactgcccagaggtggtggaggacggggtggcagaccaaacagatgagggtggcagtgtacccgtcattatcagcacatcgcgtgtgagtgcaccagctggtggcaaggccagctggggtgcagacaggtcctactggaaggag

SEQ ID NO: 4274 - DNA, 1929 bp, Homo Sapiens
gctgaggtgtggtggaaccttgtgccgcgtaagacagtgtcttctggggagctggccacggtagtacggcggttctcccagaccggcatccaggacttcctgacactgacgctgacggagcccactgggcttctgtacgtgggcgcccgagaggccctgtttgccttcagcatggaggccctggagctgcaaggagcgatctcctgggaggcccccgtggagaagaagactgagtgtatccagaaagggaagaacaaccagaccgagtgcttcaacttcatccgcttcctgcagccctacaatgcctcccacctgtacgtctgtggcacctacgccttccagcccaagtgcacctacgtcaacatgctcaccttcactttggagcatggagagtttgaagatgggaagggcaagtgtccctatgacccagctaagggccatgctggccttcttgtggatggtgagctgtactcggccacactcaacaacttcctgggcacggaacccattatcctgcgtaacatggggccccaccactccatgaagacagagtacctggccttttggctcaacgaacctcactttgtaggctctgcctatgtacctgagagtgtgggcagcttcacgggggacgacgacaaggtctacttcttcttcagggagcgggcagtggagtccgactgctatgccgagcaggtggtggctcgtgtggcccgtgtctgcaagggcgatatggggggcgcacggaccctgcagaggaagtggaccacgttcctgaaggcgcggctggcatgctctgccccgaactggcagctctacttcaaccagctgcaggcgatgcacaccctgcaggacacctcctggcacaacaccaccttctttggggtttttcaagcacagtggggtgacatgtacctgtcggccatctgtgagtaccagttggaagagatccagcgggtgtttgagggcccctataaggagtaccatgaggaagcccagaagtgggaccgctacactgaccctgtacccagccctcggcctggctcgtgcattaacaactggcatcggcgccacggctacaccagctccctggagctacccgacaacatcctcaacttcgtcaagaagcacccgctgatggaggagcaggtggggcctcggtggagccgccccctgctcgtgaagaagggcaccaacttcacccacctggtggccgaccgggttacaggacttgatggagccacctatacagtgctgttcattggcacaggagacggctggctgctcaaggctgtgagcctggggccctgggttcacctgattgaggagctgcagctgtttgaccaggagcccatgagaagcctggtgctatctcagagcaagaagctgctctttgccggctcccgctctcagctggtgcagctgcccgtggccgactgcatgaagtatcgctcctgtgcagactgtgtcctcgcccgggacccctattgcgcctggagcgtcaacaccagccgctgtgtggccgtgggtggccactctggatctctactgatccagcatgtgatgacctcggacacttcaggcatctgcaacctccgtggcagtaagaaagtcaggcccactcccaaaaacatcacggtggtggcgggcacagacctggtgctaccctgccacctctcctccaacttggcccatgcccgctggacctttgggggccgggacctgcctgcggaacagcccgggtccttcctctacgatgcccggctccaggccctggttgtgatggctgcccagccccgccatgccggggcctaccactgcttttcagaggagcagggggcgcggctggctgctgaaggctaccttgtggctgtcgtggcaggcccgtcggtgaccttggaggcccgggcccccctggaaaacctgggg

SEQ ID NO: 4275 - DNA, 2139 bp, Homo Sapiens
atggcatttgcacccataccccggatcacctgggagcacagagaggtgcacctggtgcagtttcatgagccagacatctacaactactcagccttgctgctgagcgaggacaaggacaccttgtacataggtgcccgggaggcggtcttcgctgtgaacgcactcaacatctccgagaagcagcatgaggtgtattggaaggtctcagaagacaaaaaagcaaaatgtgcagaaaaggggaaatcaaaacagacagagtgcctcaactacatccgggtgctgcagccactcagcgccacttccctttacgtgtgtgggaccaacgcattccagccggcctgtgaccacctgaacttaacatcctttaagtttctggggaaaaatgaagatggcaaaggaagatgtccctttgacccagcacacagctacacatccgtcatggttgatggagaactttattcggggacgtcgtataattttttgggaagtgaacccatcatctcccgaaattcttcccacagtcctctgaggacagaatatgcaatcccttggctgaacgagcctagtttcgtgtttgctgacgtgatccgaaaaagcccagacagccccgacggcgaggatgacagggtctacttcttcttcacggaggtgtctgtggagtatgagtttgtgttcagggtgctgatcccacggatagcaagagtgtgcaagggggaccagggcggcctgaggaccttgcagaagaaatggacctccttcctgaaagcccgactcatctgctcccggccagacagcggcttggtcttcaatgtgctgcgggatgtcttcgtgctcaggtccccgggcctgaaggtgcctgtgttctatgcactcttcaccccacagctgaacaacgtggggctgtcggcagtgtgcgcctacaacctgtccacagccgaggaggtcttctcccacgggaagtacatgcagagcaccacagtggagcagtcccacaccaagtgggtgcgctataatggcccggtacccaagccgcggcctggagcgtgcatcgacagcgaggcacgggccgccaactacaccagctccttgaatttgccagacaagacgctgcagttcgttaaagaccaccctttgatggatgactcggtaaccccaatagacaacaggcccaggttaatcaagaaagatgtgaactacacccagatcgtggtggaccggacccaggccctggatgggactgtctatgatgtcatgtttgtcagcacagaccggggagctctgcacaaagccatcagcctcgagcacgctgttcacatcatcgaggagacccagctcttccaggactttgagccagtccagaccctgctgctgtcttcaaagaagggcaacaggtttgtctatgctggctctaactcgggcgtggtccaggccccgctggccttctgtgggaagcacggcacctgcgaggactgtgtgctggcgcgggacccctactgcgcctggagcccgcccacagcgacctgcgtggctctgcaccagaccgagagccccagcaggggtttgattcaggagatgagcggcgatgcttctgtgtgcccggataaaagtaaaggaagttaccggcagcattttttcaagcacggtggcacagcggaactgaaatgctcccaaaaatccaacctggcccgggtcttttggaagttccagaatgacgtgttgaaggccgagagccccaagtacggtcttatgggcagaaaaaacttgctcatcttcaacttgtcagaaggagacagtggggtgtaccagtgcctgtcagaggagagggttaagaacaaaacggtcttccaagtggtcgccaagcacgtcctggaagtgaaggtggttccaaagcccgtagtggcccccaccttgtcagttgttcagacagaaggtagtaggattgccaccaaagtgttggtggcatccacccaagggtcttctcccccaaccccagccgtgcaggccacctcctccggggccatcacccttcctcccaagcctgcgcccaccggcacatcctgcgaaccaaagatcgtcatcaacacggtcccccagctccactcggagaaaaccatgtatcttaagtccagcgacaaccgc

SEQ ID NO: 4276 - DNA, 1875 bp, Homo Sapiens
cgcgtcccccgctcggtgcccagaacctcgcttccaatctctgaggctgactcctgtctcacccggttcgcagtccctcacacatacaattactctgttctccttgtggatcctgcctcccacacactttatgttggcgcccgggacaccatcttcgctttatccctgcccttctcaggggagagaccccgcaggattgactggatggttcctgaggctcacagacagaactgtaggaagaaaggcaagaaagaggacgaatgtcacaattttgtccagattctcgccattgccaatgcctctcacctcctcacttgtggcaccttcgcttttgatccgaagtgcggggttattgatgtgtccaggttccagcaggttgaaagacttgagagtggccgggggaaatgtccttttgagccagctcagcggtcagcagctgtaatggctgggggggtcctctatgctgccactgtgaaaaactacctggggacggagccaattatcaccagagcagtgggtcgtgccgaggactggattcggacagataccttgccttcctggctgaacgccccagcctttgtcgcagccgtggccttgagcccagccgaatggggggatgaagatggagacgacgaaatctacttcttctttacggagacttcccgagcatttgactcatacgagcgcattaaagtcccacgggtggcccgtgtgtgtgcgggggacctcgggggccggaagaccctccagcagagatggacgacgtttttgaaagctgacctgctctgtccagggcctgagcatggccgggcctccagtgtcctgcaggatgttgctgtgcttcgacctgagcttggggcagggactcccatcttttatggcatcttttcttcccagtgggagggggctactatctctgctgtctgtgccttccgaccacaagacattcggacagtgctgaatggtcccttcagagaactaaaacatgactgcaacagaggactgcctgtcgtggacaatgatgtgccccagcccagacctggagagtgcatcaccaacaacatgaagctccggcactttggctcatctctctccctgcctgaccgcgtactcaccttcatccgggaccacccactcatggacaggccagtgtttccagctgatggccaccccctgctggtcactacagatacagcctatctcagagtcgtggcccacagggtgaccagcctctcagggaaagagtatgatgtgctctacctggggacagaggatggacacctccaccgagcagtgcggatcggagctcagctcagcgttcttgaagatctggccttattcccagagccacagccagttgagaacatgaaattgtaccacagctggctcctggttggctcccgtactgaggtgacacaagtgaatacaaccaactgtggccgtctccagagctgctcagagtgcatcctggcccaggacccagtctgtgcctggagcttccggctggatgagtgtgtggcccatgccggggagcaccgagggttggtccaagacatagagtcagcagatgtctcctctttgtgtcctaaagagcctggagaacgtccagtagtgtttgaagttcccgtggctacagctgcgcatgtggtcttgccatgttctccaagctcagcatgggcatcctgtgtgtggcaccagcccagtggagtgactgcactcaccccccggcgggatggactggaggtggtggtgaccccaggggccatgggcgcttatgcctgtgaatgtcaggagggtggggcagcccatgtggtagcagcttacagcttggtatggggcagccagcgagatgctccgagccgggcccacacagtg

SEQ ID NO: 4277 - DNA, 1989 bp, Homo Sapiens
gtcccaggaccctcactgcggagaccgtctagagaactagatgccacccctcggatgaccataccctatgaagagctctctgggacccggcacttcaagggccaagcccagaactactcaacactgctgctggaggaggcctcagcaaggctgctggtgggagcccgaggtgccctgttctctctcagtgccaacgacataggagatggggctcacaaagagatccactgggaagcctccccagagatgcaaagcaaatgtcatcaaaaagggaaaaacaaccagacggagtgctttaaccatgtgcggttcctgcagcggctcaattctacccacctctatgcatgtgggactcacgccttccagcccctctgtgcagccattgatgctgaggccttcaccttgccaaccagcttcgaggaggggaaggagaagtgtccttatgacccagcccgtggcttcacaggcctcatcattgatggaggcctctacacagccactaggtatgaattccggagcattcctgacatccgccggagccgccacccacactccctgagaactgaggagacaccaatgcattggctcaatgatgcggagtttgtgttctccgtcctcgtgcgggagagcaaggccagtgcagtgggtgatgatgacaaggtgtactacttcttcacggagcgtgccactgaggagggctctggcagcttcactcagagccgcagcagtcaccgtgtggcccgtgtggctcgtgtctgcaagggagacctgggagggaagaagatcctgcagaagaagtggacttccttcctgaaagcccgtctcatctgccacattccactgtatgagacactgcgtggggtctgcagcctggatgctgaaacctcaagccgtacacacttctatgcagccttcacgctgagcacacagtggaagaccctggaggcctcagccatctgccgctatgacctggcagagatccaggctgtctttgcaggaccctatatggaataccaggatggttcccggcgctggggtcgctatgagggtggggtgcctgagccccggcctggctcgtgtatcacagattcattgcgcagccaaggctacaattcatcccaagacttgccatccctggtcctggactttgtaaagttgcacccactgatggctcggcccgttgtgcccacacgtggacggcccctgctgctcaagcgcaacatacgctacacacaccttacagggacacctgtcaccacgcctgctggacctacctatgacctgctctttctgggcacagctgatggctggatccacaaggccgtagtcctgggctctgggatgcacattattgaagagacacaagtgttcagggagtcccagtctgtggaaaatctagtcatctctctattgcagcacagcctctatgtgggggctcctagcggagtcatccagctaccactctccagctgctcccgctaccgatcctgctatgactgcatcttggcccgagacccctactgtggctgggaccctggcacccatgcctgcgcagcagccaccaccatagccaacaggtcccagggaagcaggacagcactgatacaggacatagagagaggaaatcgaggctgtgagagcagcagggatacagggccaccaccaccactgaagacccgctctgtgctccggggtgatgatgtcctcctgccctgtgaccagccatccaacctggcccgggccttgtggctactcaatgggagcatgggcctgagcgatgggcagggtggctaccgtgtgggcgtggacgggctgctggttacagatgcacagcctgagcacagtggcaactatggctgctatgccgaggaaaatggcctccgcaccctgctggcctcctatagtctcacagtccggccagccactcctgccccagctccaaaagcccctgccacacctggggcacagctggcacctgatgtgagactg

SEQ ID NO: 4278 - DNA, 3108 bp, Homo Sapiens
atgccctgtggcttcagtccgtctcctgttgcccaccacctcgtccctgggccgcctgataccccagcccaacagctaaggtgtggatggacagtagggggctggcttctctcactggtcaggggtcttctcccctgtctgcctcccggagctaggactgcagaggggcctatcatggtgcttgcaggccccctggctgtctcgctgttgctgcccagcctcacactgctggtgtcccacctctccagctcccaggatgtctccagtgagcccagcagtgagcagcagctgtgcgcccttagcaagcaccccaccgtggcctttgaagacctgcagccgtgggtctctaacttcacctaccctggagcccgggatttctcccagctggctttggacccctccgggaaccagctcatcgtgggagccaggaactacctcttcagactcagccttgccaatgtctctcttcttcaggccacagagtgggcctccagtgaggacacgcgccgctcctgccaaagcaaagggaagactgaggaggagtgtcagaactacgtgcgagtcctgatcgtcgccggccggaaggtgttcatgtgtggaaccaatgccttttcccccatgtgcaccagcagacaggtggggaacctcagccggactattgagaagatcaatggtgtggcccgctgcccctatgacccacgccacaactccacagctgtcatctcctcccagggggagctctatgcagccacggtcatcgacttctcaggtcgggaccctgccatctaccgcagcctgggcagtgggccaccgcttcgcactgcccaatataactccaagtggcttaatgagccaaacttcgtggcagcctatgatattgggctgtttgcatacttcttcctgcgggagaacgcagtggagcacgactgtggacgcaccgtgtactctcgcgtggcccgcgtgtgcaagaatgacgtggggggccgattcctgctggaggacacatggaccacattcatgaaggcccggctcaactgctcccgcccgggcgaggtccccttctactataacgagctgcagagtgccttccacttgccggagcaggacctcatctatggagttttcacaaccaacgtaaacagcattgcggcttctgctgtctgcgccttcaacctcagtgctatctcccaggctttcaatggcccatttcgctaccaggagaaccccagggctgcctggctccccatagccaaccccatccccaatttccagtgtggcaccctgcctgagaccggtcccaacgagaacctgacggagcgcagcctgcaggacgcgcagcgcctcttcctgatgagcgaggccgtgcagccggtgacacccgagccctgtgtcacccaggacagcgtgcgcttctcacacctcgtggtggacctggtgcaggctaaagacacgctctaccatgtactctacattggcaccgagtcgggcaccatcctgaaggcgctgtccacggcgagccgcagcctccacggctgctacctggaggagctgcacgtgctgccccccgggcgccgcgagcccctgcgcagcctgcgcatcctgcacagcgcccgcgcgctcttcgtggggctgagagacggcgtcctgcgggtcccactggagaggtgcgccgcctaccgcagccagggggcatgcctgggggcccgggacccgtactgtggctgggacgggaagcagcaacgttgcagcacactcgaggacagctccaacatgagcctctggacccagaacatcaccgcctgtcctgtgcggaatgtgacacgggatgggggcttcggcccatggtcaccatggcaaccatgtgagcacttggatggggacaactcaggctcttgcctgtgtcgagctcgatcctgtgattcccctcgaccccgctgtgggggccttgactgcctggggccagccatccacatcgccaactgctccaggaatggggcgtggaccccgtggtcatcgtgggcgctgtgcagcacgtcctgtggcatcggcttccaggtccgccagcgaagttgcagcaaccctgctccccgccacgggggccgcatctgcgtgggcaagagccgggaggaacggttctgtaatgagaacacgccttgcccggtgcccatcttctgggcttcctggggctcctggagcaagtgcagcagcaactgtggagggggcatgcagtcgcggcgtcgggcctgcgagaacggcaactcctgcctgggctgcggcgtggagttcaagacgtgcaaccccgagggctgccccgaagtgcggcgcaacaccccctggacgccgtggctgcccgtgaacgtgacgcagggcggggcacggcaggagcagcggttccgcttcacctgccgcgcgccccttgcagacccgcacggcctgcagttcggcaggagaaggaccgagacgaggacctgtcccgcggacggctccggctcctgcgacaccgacgccctggtggaggacctcctgcgcagcgggagcacctccccgcacacggtgagcgggggctgggccgcctggggcccgtggtcgtcctgctcccgggactgcgagctgggcttccgcgtccgcaagagaacgtgcactaacccggagccccgcaacgggggcctgccctgcgtgggcgatgctgccgagtaccaggactgcaacccccaggcttgcccagttcggggtgcttggtcctgctggacctcatggtctccatgctcagcttcctgtggtgggggtcactatcaacgcacccgttcctgcaccagccccgcaccctccccaggtgaggacatctgtctcgggctgcacacggaggaggcactatgtgccacacaggcctgcccagaaggctggtcgccctggtctgagtggagtaagtgcactgacgacggagcccagagccgaagccggcactgtgaggagctcctcccagggtccagcgcctgtgctggaaacagcagccagagccgcccctgcccctacagcgagattcccgtcatcctgccagcctccagcatggaggaggccaccggctgtgcagggttcaatctcatccac

SEQ ID NO: 4279 - DNA, 1893 bp, Homo Sapiens
ggtttcccagaagattctgagccaatcagtatttcgcatggcaactatacaaaacagtatccggtgtttgtgggccacaagccaggacggaacaccacacagaggcacaggctggacatccagatgattatgatcatgaacggaaccctctacattgctgctagggaccatatttatactgttgatatagacacatcacacacggaagaaatttattgtagcaaaaaactgacatggaaatctagacaggccgatgtagacacatgcagaatgaagggaaaacataaggatgagtgccacaactttattaaagttcttctaaagaaaaacgatgatgcattgtttgtctgtggaactaatgccttcaacccttcctgcagaaactataagatggatacattggaaccattcggggatgaattcagcggaatggccagatgcccatatgatgccaaacatgccaacgttgcactgtttgcagatggaaaactatactcagccacagtgactgacttccttgccattgacgcagtcatttaccggagtcttggagaaagccctaccctgcggaccgtcaagcacgattcaaaatggttgaaagaaccatactttgttcaagccgtggattacggagattatatctacttcttcttcagggaaatagcagtggagtataacaccatgggaaaggtagttttcccaagagtggctcaggtttgtaagaatgatatgggaggatctcaaagagtcctggagaaacagtggacgtcgttcctgaaggcgcgcttgaactgctcagttcctggagactctcatttttatttcaacattctccaggcagttacagatgtgattcgtatcaacgggcgtgatgttgtcctggcaacgttttctacaccttataacagcatccctgggtctgcagtctgtgcctatgacatgcttgacattgccagtgtttttactgggagattcaaggaacagaagtctcctgattccacctggacaccagttcctgatgaacgagttcctaagcccaggccaggttgctgtgctggctcatcctccttagaaagatatgcaacctccaatgagttccctgatgataccctgaacttcatcaagacgcacccgctcatggatgaggcagtgccctccatcttcaacaggccatggttcctgagaacaatggtcagataccgccttaccaaaattgcagtggacacagctgctgggccatatcagaatcacactgtggtttttctgggatcagagaagggaatcatcttgaagtttttggccagaataggaaatagtggttttctaaatgacagccttttcctggaggagatgagtgtttacaactctgaaaaatgcagctatgatggagtcgaagacaaaaggatcatgggcatgcagctggacagagcaagcagctctctgtatgttgcgttctctacctgtgtgataaaggttccccttggccggtgtgaacgacatgggaagtgtaaaaaaacctgtattgcctccagagacccatattgtggatggataaaggaaggtggtgcctgcagccatttatcacccaacagcagactgacttttgagcaggacatagagcgtggcaatacagatggtctgggggactgtcacaattcctttgtggcactgaatgggcattccagttccctcttgcccagcacaaccacatcagattcgacggctcaagaggggtatgagtctaggggaggaatgctggactggaagcatctgcttgactcacctgacagcacagaccctttgggggcagtgtcttcccataatcaccaagacaagaagggagtgattcgggaaagttacctcaaaggccacgaccagctggttcccgtcacc

SEQ ID NO: 4280 - DNA, 1734 bp, Homo Sapiens
ctctttcctgaggagccgccgccgcttagcgtggcccccagggactacctgaaccactatcccgtgtttgtgggcagcgggcccggacgcctgacccccgcagaaggtgctgacgacctcaacatccagcgagtcctgcgggtcaacaggacgctgttcattggggacagggacaacctctaccgcgtagagctggagccccccacgtccacggagctgcggtaccagaggaagctgacctggagatctaaccccagcgacataaacgtgtgtcggatgaagggcaaacaggagggcgagtgtcgaaacttcgtaaaggtgctgctccttcgggacgagtccacgctctttgtgtgcggttccaacgccttcaacccggtgtgcgccaactacagcatagacaccctgcagcccgtcggagacaacatcagcggtatggcccgctgcccgtacgaccccaagcacgccaatgttgccctcttctctgacgggatgctcttcacagctactgttaccgacttcctagccattgatgctgtcatctaccgcagcctcggggacaggcccaccctgcgcaccgtgaaacatgactccaagtggttcaaagagccttactttgtccatgcggtggagtggggcagccatgtctacttcttcttccgggagattgcgatggagtttaactacctggagaaggtggtggtgtcccgcgtggcccgagtgtgcaagaacgacgtgggaggctccccccgcgtgctggagaagcagtggacgtccttcctgaaggcgcggctcaactgctctgtacccggagactcccatttctacttcaacgtgctgcaggctgtcacgggcgtggtcagcctcgggggccggcccgtggtcctggccgttttttccacgcccagcaacagcatccctggctcggctgtctgcgcctttgacctgacacaggtggcagctgtgtttgaaggccgcttccgagagcagaagtcccccgagtccatctggacgccggtgccggaggatcaggtgcctcgaccccggcccgggtgctgcgcagcccccgggatgcagtacaatgcctccagcgccttgccggatgacatcctcaactttgtcaagacccaccctctgatggacgaggcggtgccctcgctgggccatgcgccctggatcctgcggaccctgatgaggcaccagctgactcgagtggctgtggacgtgggagccggcccctggggcaaccagaccgttgtcttcctgggttctgaggcggggacggtcctcaagttcctcgtccggcccaatgccagcacctcagggacgtctgggctcagtgtcttcctggaggagtttgagacctaccggccggacaggtgtggacggcccggcggtggcgagacagggcagcggctgctgagcttggagctggacgcagcttcggggggcctgctggctgccttcccccgctgcgtggtccgagtgcctgtggctcgctgccagcagtactcggggtgtatgaagaactgtatcggcagtcaggacccctactgcgggtgggcccccgacggctcctgcatcttcctcagcccgggcaccagagccgcctttgagcaggacgtgtccggggccagcacctcaggcttaggggactgcacaggactcctgcgggccagcctctccgaggaccgcgcggggctggtgtcggtgaacctgctggtaacgtcgtcg

SEQ ID NO: 4281 - DNA, 1539 bp, Homo Sapiens
gcctttccccaggaccccctccctctgttgatctctgaccttcaaggtacttccccattatcctggtttcggggcctggaggatgatgctgtggctgcagaacttgggctggactttcagagattcctgaccttgaaccggaccttgctagtggctgcccgggatcacgttttctccttcgatcttcaagccgaagaagaaggggaggggctggtgcccaacaagtatctaacatggagaagccaagatgtggagaactgtgctgtacggggaaagctgacggatgagtgctacaactatattcgtgttcttgttccctgggactcccagacgctccttgcctgtggaacgaactcattcagccctgtgtgccgcagctatgggataacttcgctgcagcaggagggtgaggaactgagtgggcaggctcgatgcccctttgatgccacccagtccaacgtggccatctttgcagagggcagcctgtactcagccacagctgcggatttccaggccagtgatgctgtagtttacagaagccttgggccccagcccccactccgctccgccaagtatgactccaagtggctccgagagccacactttgtccaggccttggagcatggagaccatgtctacttcttcttccgcgaggtctctgtggaggatgctcggctggggagggtgcagttctcccgcgtagcccgagtatgtaaacgtgacatgggcggctcgcctcgggccttggaccgccactggacatccttcctgaagcttcggctcaactgctctgtccctggggactctactttctattttgatgttttacaggccttgactgggcctgtgaacctgcatggccgctctgctctctttggggtcttcaccacccagaccaatagcatccctggctctgccgtctgcgccttctacctggatgagattgagcgtgggtttgagggcaagttcaaggagcagaggagtctggatggggcctggactcctgtgtctgaggacagagttccctcacccaggccaggatcctgccctgctcactcgagtcccctcgggaggtccctccaggtactccgggggtcccgggaagcacctcctgtacctgggccggcccgagggctaccggggccgcgccctgaaaagggtggacgtcgagaagccccagttgtccctgaagcctcccctcgtcgggccctcctcccgccaggccgtcccgaacggcggccgtttcaacttttaaagggagcggtccacggcctccagcgtggggagcgcccgagtcctctcggccacgagctggacgctcttcaggacgtttcaccgccccctcgccccgcacctccagccttcccgactcgcagagtctcccgaggccccttttcgcctcgggtttatttattgactgtctttccccctgtcctcgacagaagagtgggaggtgagaagcccgtctcctcagtgagccagcatttcagggggagctggcggactcccactccccgctcccttccagccaagctgcct

SEQ ID NO: 4282 - DNA, 1812 bp, Homo Sapiens
cagggccacctaaggagcggaccccgcatcttcgccgtctggaaaggccatgtagggcaggaccgggtggactttggccagactgagccgcacacggtgcttttccacgagccaggcagctcctctgtgtgggtgggaggacgtggcaaggtctacctctttgacttccccgagggcaagaacgcatctgtgcgcacggtgaatatcggctccacaaaggggtcctgtctggataagcgggactgcgagaactacatcactctcctggagaggcggagtgaggggctgctggcctgtggcaccaacgcccggcaccccagctgctggaacctggtgaatggcactgtggtgccacttggcgagatgagaggctacgcccccttcagcccggacgagaactccctggttctgtttgaaggggacgaggtgtattccaccatccggaagcaggaatacaatgggaagatccctcggttccgccgcatccggggcgagagtgagctgtacaccagtgatactgtcatgcagaacccacagttcatcaaagccaccatcgtgcaccaagaccaggcttacgatgacaagatctactacttcttccgagaggacaatcctgacaagaatcctgaggctcctctcaatgtgtcccgtgtggcccagttgtgcaggggggaccagggtggggaaagttcactgtcagtctccaagtggaacacttttctgaaagccatgctggtatgcagtgatgctgccaccaacaagaacttcaacaggctgcaagacgtcttcctgctccctgaccccagcggccagtggagggacaccagggtctatggtgttttctccaacccctggaactactcagccgtctgtgtgtattccctcggtgacattgacaaggtcttccgtacctcctcactcaagggctaccactcaagccttcccaacccgcggcctggcaagtgcctcccagaccagcagccgatacccacagagaccttccaggtggctgaccgtcacccagaggtggcgcagagggtggagcccatggggcctctgaagacgccattgttccactctaaataccactaccagaaagtggccgtccaccgcatgcaagccagccacggggagacctttcatgtgctttacctaactacagacaggggcactatccacaaggtggtggaaccgggggagcaggagcacagcttcgccttcaacatcatggagatccagcccttccgccgcgcggctgccatccagaccatgtcgctggatgctgagcggaggaagctgtatgtgagctcccagtgggaggtgagccaggtgcccctggacctgtgtgaggtctatggcgggggctgccacggttgcctcatgtcccgagacccctactgcggctgggaccaaggccgctgcatctccatctacagctccgaacggtcagtgctgcaatccattaatccagccgagccacacaaggagtgtcccaaccccaaaccagacaaggccccactgcagaaggtttccctggccccaaactctcgctactacctgagctgccccatggaatcccgccacgccacctactcatggcgccacaaggagaacgtggagcagagctgcgaacctggtcaccagagccccaactgcatcctgttcatcgagaacctcacggcgcagcagtacggccactacttctgcgaggcccaggagggctcctacttccgcgaggctcagcactggcagctgctgcccgaggacggcatcatggccgagcacctgctgggtcatgcctgtgccctggcc

SEQ ID NO: 4283 - DNA, 351 bp, Homo Sapiens
atgacagtaggagagaaggtcttctccagcaatgggcagtccatcacttttgatgccattcaggaggcatgtgccagagcaggcggccgcattgctgtcccaaggaatccagaggaaaatgaggccattgcaagcttcgtgaagaagtacaacacatatgcctatgtaggcctgactgagggtcccagccctggagacttccgctactcagacgggacccctgtaaactacaccaactggtaccgaggggagcccgcaggtcggggaaaagagcagtgtgtggagatgtacacagatgggcagtggaatgacaggaactgcctgtactcccgactgaccatctgtgagttc

SEQ ID NO: 4284 - DNA, 684 bp, Homo Sapiens
gaagtgaaggacgtttgtgttggaagccctggtatccccggcactcctggatcccacggcctgccaggcagggacgggagagatggtgtcaaaggagaccctggccctccaggccccatgggtccgcctggagaaacaccatgtcctcctgggaataatgggctgcctggagcccctggtgtccctggagagcgtggagagaagggggaggctggcgagagaggccctccagggcttccagctcatctagatgaggagctccaagccacactccacgacttcagacatcaaatcctgcagacaaggggagccctcagtctgcagggctccataatgacagtaggagagaaggtcttctccagcaatgggcagtccatcacttttgatgccattcaggaggcatgtgccagagcaggcggccgcattgctgtcccaaggaatccagaggaaaatgaggccattgcaagcttcgtgaagaagtacaacacatatgcctatgtaggcctgactgagggtcccagccctggagacttccgctactcagacgggacccctgtaaactacaccaactggtaccgaggggagcccgcaggtcggggaaaagagcagtgtgtggagatgtacacagatgggcagtggaatgacaggaactgcctgtactcccgactgaccatctgtgagttc

SEQ ID NO: 4285 - DNA, 1065 bp, Homo Sapiens
gcaggaatgaagacctactcccacagaacaatgcccagtgcttgcaccctggtcatgtgtagctcagtggagagtggcctgcctggtcgcgatggacgggatgggagagagggccctcggggcgagaagggggacccaggtttgccaggagctgcagggcaagcagggatgcctggacaagctggcccagttgggcccaaaggggacaatggctctgttggagaacctggaccaaagggagacactgggccaagtggacctccaggacctcccggtgtgcctggtccagctggaagagaaggtcccctggggaagcaggggaacataggacctcagggcaagccaggcccaaaaggagaagctgggcccaaaggagaagtaggtgccccaggcatgcagggctcggcaggggcaagaggcctcgcaggccctaagggagagcgaggtgtccctggtgagcgtggagtccctggaaacacaggggcagcagggtctgctggagccatgggtccccagggaagtccaggtgccaggggacccccgggattgaagggggacaaaggcattcctggagacaaaggagcaaagggagaaagtgggcttccagatgttgcttctctgaggcagcaggttgaggccttacagggacaagtacagcacctccaggctgctttctctcagtataagaaagttgagctcttcccaaatggccaaagtgtcggggagaagattttcaagacagcaggctttgtaaaaccatttacggaggcacagctgctgtgcacacaggctggtggacagttggcctctccacgctctgccgctgagaatgccgccttgcaacagctggtcgtagctaagaacgaggctgctttcctgagcatgactgattccaagacagagggcaagttcacctaccccacaggagagtccctggtctattccaactgggccccagggaagcccaacgatgatggcgggtcagaggactgtgtggagatcttcaccaatggcaagtggaatgacagggcttgtggagaaaagcgtcttgtggtctgcgagttc

SEQ ID NO: 4286 - DNA, 354 bp, Homo Sapiens
atgccaggtgtctgtgatagggcccctgacttcctctccccgtctgaagaccaggtgctgaggcctgccttgggcagctcagtggctctgaactgcacggcttgggtagtctctgggccccactgctccctgccttcagtccagtggctgaaagacgggcttccattgggaattgggggccactacagcctccacgagtactcctgggtcaaggccaacctgtcagaggtgcttgtgtccagtgtcctgggggtcaacgtgaccagcactgaagtctatggggccttcacctgctccatccagaacatcagcttctcctccttcactcttcagagagctggccctacaagccac

SEQ ID NO: 4287 - DNA, 1602 bp, Homo Sapiens
atggatgggagattctggatacgagtgcaggagtcagtgatggtgccggagggcctgtgcatctctgtgccctgctctttctcctacccccgacaagactggacagggtctaccccagcttatggctactggttcaaagcagtgactgagacaaccaagggtgctcctgtggccacaaaccaccagagtcgagaggtggaaatgagcacccggggccgattccagctcactggggatcccgccaaggggaactgctccttggtgatcagagacgcgcagatgcaggatgagtcacagtacttctttcgggtggagagaggaagctatgtgagatataatttcatgaacgatgggttctttctaaaagtaacagccctgactcagaagcctgatgtctacatccccgagaccctggagcccgggcagccggtgacggtcatctgtgtgtttaactgggcctttgaggaatgtccacccccttctttctcctggacgggggctgccctctcctcccaaggaaccaaaccaacgacctcccacttctcagtgctcagcttcacgcccagaccccaggaccacaacaccgacctcacctgccatgtggacttctccagaaagggtgtgagcgtacagaggaccgtccgactccgtgtggcctatgcccccagagaccttgttatcagcatttcacgtgacaacacgccagccctggagccccagccccagggaaatgtcccatacctggaagcccaaaaaggccagttcctgcggctcctctgtgctgctgacagccagccccctgccacactgagctgggtcctgcagaacagagtcctctcctcgtcccatccctggggccctagacccctggggctggagctgcccggggtgaaggctggggattcagggcgctacacctgccgagcggagaacaggcttggctcccagcagcgagccctggacctctctgtgcagtatcctccagagaacctgagagtgatggtttcccaagcaaacaggacagtcctggaaaaccttgggaacggcacgtctctcccagtactggagggccaaagcctgtgcctggtctgtgtcacacacagcagccccccagccaggctgagctggacccagaggggacaggttctgagcccctcccagccctcagaccccggggtcctggagctgcctcgggttcaagtggagcacgaaggagagttcacctgccacgctcggcacccactgggctcccagcacgtctctctcagcctctccgtgcactactccccgaagctgctgggcccctcctgctcctgggaggctgagggtctgcactgcagctgctcctcccaggccagcccggccccctctctgcgctggtggcttggggaggagctgctggaggggaacagcagccaggactccttcgaggtcacccccagctcagccgggccctgggccaacagctccctgagcctccatggagggctcagctccggcctcaggctccgctgtgaggcctggaacgtccatggggcccagagtggatccatcctgcagctgccagataagaagggactcatctcaacggcattctccaac

SEQ ID NO: 4288 - DNA, 1602 bp, Homo Sapiens
ctgaacaaggatcccagttacagtcttcaagtgcagaggcaggtgccggtgccggagggcctgtgtgtcatcgtgtcttgcaacctctcctacccccgggatggctgggacgagtctactgctgcttatggctactggttcaaaggacggaccagcccaaagacgggtgctcctgtggccactaacaaccagagtcgagaggtggaaatgagcacccgggaccgattccagctcactggggatcccggcaaagggagctgctccttggtgatcagagacgcgcagagggaggatgaggcatggtacttctttcgggtggagagaggaagccgtgtgagacatagtttcctgagcaatgcgttctttctaaaagtaacagccctgactaagaagcctgatgtctacatccccgagaccctggagcccgggcagccggtgacggtcatctgtgtgtttaactgggctttcaagaaatgtccagccccttctttctcctggacgggggctgccctctcccctagaagaaccagaccaagcacctcccacttctcagtgctcagcttcacgcccagcccccaggaccacgacaccgacctcacctgccatgtggacttctccagaaagggtgtgagcgcacagaggaccgtccgactccgtgtggcctatgcccccaaagaccttattatcagcatttcacatgacaacacgtcagccctggaactccagggaaacgtcatatatctggaagttcagaaaggccagttcctgcggctcctctgtgctgctgacagccagccccctgccacgctgagctgggtcctgcaggacagagtcctctcctcgtcccacccctggggccccagaaccctggggctggagctgcgtggggtaagggccggggattcagggcgctacacctgccgagcggagaacaggcttggctcccagcagcaagccctggacctctctgtgcagtatcctccagagaacctgagagtgatggtttcccaagcaaacaggacagtcctggaaaacctcgggaacggcacatccctcccggtcctggagggccaaagcctgcgcctggtctgtgtcacccacagcagccccccagccaggctgagctggacccggtggggacagaccgtgggcccctcccagccctcagaccccggggtcctggagctgccacccattcaaatggagcacgaaggagagttcacctgccacgctcagcaccctctgggctcccagcacgtctctctcagcctctccgtgcactaccctccacagctgctgggcccctcctgctcctgggaggctgagggtctgcactgcagctgctcctcccaggccagcccggccccctctctgcgctggtggcttggggaggagctgctggaggggaacagcagtcagggctccttcgaggtcacccccagctcagccgggccctgggccaacagctccctgagcctccatggagggctcagctccggcctcaggctccgctgtaaggcctggaacgtccacggggcccagagtggctctgtcttccagctgctaccagggaagctggagcatgggggaggacttggcctg

SEQ ID NO: 4289 - DNA, 1389 bp, Homo Sapiens
aaggaacagaaggattacctgctgacaatgcagaagtccgtgacggtgcaggagggcctgtgtgtctctgtgctttgctccttctcctacccccaaaatggctggactgcctccgatccagttcatggctactggttccgggcaggggaccatgtaagccggaacattccagtggccacaaacaacccagctcgagcagtgcaggaggagactcgggaccgattccacctccttggggacccacagaacaaggattgtaccctgagcatcagagacaccagagagagtgatgcagggacatacgtcttttgtgtagagagaggaaatatgaaatggaattataaatatgaccagctctctgtgaatgtgacagcgtcccaggacctactgtcaagatacaggctggaggtgccagagtcggtgactgtgcaggagggtctgtgtgtctctgtgccctgcagtgtcctttacccccattacaactggactgcctctagccctgtttatggatcctggttcaaggaaggggccgatataccatgggatattccagtggccacaaacaccccaagtggaaaagtgcaagaggatacccacggtcgattcctcctccttggggacccacagaccaacaactgctccctgagcatcagagatgccaggaagggggattcagggaagtactacttccaggtggagagaggaagcaggaaatggaactacatatatgacaagctctctgtgcatgtgacagccctgactcacatgcccaccttctccatcccggggaccctggagtctggccaccccaggaacctgacctgctctgtgccctgggcctgtgaacaggggacgccccccacgatcacctggatgggggcctccgtgtcctccctggaccccactatcactcgctcctcgatgctcagcctcatcccacagccccaggaccatggcaccagcctcacctgtcaggtgaccttgcctggggccggcgtgaccatgaccagggctgtccgactcaacatatcctatcctcctcagaacttgaccatgactgtcttccaaggagatggcacagcatccacaaccttgaggaatggctcggccctttcagtcctggagggccagtccctgcaccttgtctgtgctgtcgacagcaatccccctgccaggctgagctggacctgggggagcctgaccctgagcccctcacagtcctcgaaccttggggtgctggagctgcctcgagtgcatgtgaaggatgaaggggaattcacctgccgagctcagaaccctctaggctcccagcacatttccctgagcctctccctgcaaaacgagtacacaggcaaaatgaggcctatatcaggagtgacgctaggggca

SEQ ID NO: 4290 - DNA, 1026 bp, Homo Sapiens
gagaaacctgtatacgaattacaggtgcagaagtcagtgacagttcaagaaggtttgtgtgttctagtgccatgctccttcagctacccctggaggtcctggtattcatctccacccttgtacgtttactggttccgtgatggtgaaatcccttattacgcggaggtcgtagcaacgaataaccctgacagacgtgttaagccggagacgcaaggtaggttcaggctgcttggagatgttcaaaagaagaactgtagcctttccattggtgacgccagaatggaggacacaggctcctacttctttagagtcgaaagaggccgtgacgtaaagtattcttaccaacagaacaaattgaatttagaagtaacggctctgatcgaaaaacccgacattcactttttggagcccttagaaagcggaagaccaaccagactatcctgcagccttccaggttcctgtgaagccgggccaccactaacattttcatggactggcaatgcccttagtcctttggacccagagactactagaagtagtgaactaacacttacccctaggcccgaggatcacggaactaaccttacttgccaagtaaagagacagggggcacaagtgacaacagagagaaccgtacaactaaatgtgagctacgctccccagaaccttgctatcagcatcttctttaggaatgggacagggacagccctaagaatactttctaatggcatgagcgttccgatccaggagggacaatctttgttccttgcgtgcacagtcgactccaatcctccggcctcactatcttggtttcgtgaaggaaaggccctgaatcctagtcaaacttcaatgtctggtaccctagagcttcccaacatcggtgcgagggaaggaggggaattcacatgccgtgtacagcatcccctaggtagtcagcatctatcattcattctatctgtacagcgtagttcctcttcatgtatctgcgttaccgagaaacaacagggcagttggccgcttgtgttg

SEQ ID NO: 4291 - DNA, 732 bp, Homo Sapiens
tttgtaaggacaaaaattgataccacggagaacttgctaaacaccgaagtgcatagcagtccagcccaacgttggtccatgcaagttcctcctgaagtttcagctgaagccggtgatgccgcggtccttccatgtaccttcacacaccctcacagacactacgatggccctcttacagccatttggagggcaggagaaccgtatgcgggaccccaggtgtttcgttgcgcggctgccagagggtccgaactttgtcaaacggcactgagtctgcacggccgtttccgtctgttgggcaacccgagaaggaatgacttgtcattacgtgtagagagattggctctagccgacgacagaagatacttttgtagagtagagtttgcaggcgatgttcacgaccgttacgagagcagacacggagtgaggcttcatgttaccgccgccccaagaattgttaatatttcagtcttgccctccccagctcatgcgttcagggcgctttgtaccgcggagggcgagccccctccagccctggcttggagcggcccagcattggggaactccctagctgccgtccgtagtccacgtgagggacacggtcacttagtgacagccgaactacctgcgttaacccatgatggaagatacacgtgcacagccgcaaatagcttaggaagaagcgaggcatccgtctatctgttcagattccacggggcgagtggagctagtaca

SEQ ID NO: 4292 - DNA, 1254 bp, Homo Sapiens
aacaaagatcctagttactcacttcaggttcaaagacaagttccagttccagaagggctgtgtgttattgtgtcctgtaatttatcctacccgagagatggatgggacgaatctacggcagcctacgggtattggttcaaaggacgtaccagccccaagactggagcgcctgtcgcgacaaataaccaatccagagaggtggctatgtccacgagagataggtttcaattaactggtgatccggggaaggggtcttgttccctggtgattagggacgctcaaagagaggacgaagcgtggtatttttttagagtggagagaggttctcgtgtaagacattccttcctatcaaacgccttctttctgaaagtgacggcgctgacgcaaaaaccggacgtctatatacctgagacactggaaccaggacagccggtaacagtgatctgcgtatttaactgggctttcaaaaaatgtcctgcgccgtccttcagttggaccggggccgctttaagcccaaggagaacgagaccatcaacttcccatttttctgtattgtcttttacaccgtcaccacaagaccatgataccgatttaacgtgccacgttgacttcagcagaaaaggcgtctccgctcaaagaacggtgcgtctaagagtagctagtctagagctgcaaggcaatgtcatctatctagaggtccaaaaggggcaatttcttcgtcttctatgtgcagctgacagccagcctcctgctactcttagctgggttttacaggatagagtgctgagttctagccatccgtgggggccgaggactctaggcttagaactacccggcgttaaggcaggtgactctggaagatatacttgccgtgcagagaaccgtctggggagccaacagagagcgctggatctgtctgtacaatacccgcctgagaatttaagagtaatggttagccaggcaaatcgtactgttttggaaaacctgaggaatggcactagcttgcgtgtccttgaggggcagagcctgagactagtttgtgtgacacattcaagtccgccggcacgtctgagctggacctggggggaacaaacagtgggcccatctcaacctagcgatccaggggtcttacagctaccgcgtgtccaaatggaacacgagggtgagtttacttgtcatgctcgtcacccgctgggctcccaaagagtatctttgtcattcagcgttcactgcaaatccggcccaatgacaggc

SEQ ID NO: 4293 - DNA, 1275 bp, Homo Sapiens
gagaagccagtgtacgagctgcaagtgcagaagtcggtgacggtgcaggagggcctgtgcgtccttgtgccctgctccttctcttacccctggagatcctggtattcctctcccccactctacgtctactggttccgggacggggagatcccatactacgctgaggttgtggccacaaacaacccagacagaagagtgaagccagagacccagggccgattccgcctccttggggatgtccagaagaagaactgctccctgagcatcggagatgccagaatggaggacacgggaagctatttcttccgcgtggagagaggaagggatgtaaaatatagctaccaacagaataagctgaacttggaggtgacagccctgatagagaaacccgacatccactttctggagcctctggagtccggccgccccacaaggctgagctgcagccttccaggatcctgtgaagcgggaccacctctcacattctcctggacggggaatgccctcagccccctggaccccgagaccacccgctcctcggagctcaccctcacccccaggcccgaggaccatggcaccaacctcacctgtcagatgaaacgccaaggagctcaggtgaccacggagagaactgtccagctcaatgtctcctatgcaccacagaccatcaccatcttcaggaacggcatagccctagagatcctgcaaaacacctcataccttccggtcctggagggccaggctctgcggctgctctgtgatgctcccagcaacccccctgcacacctgagctggttccagggctcccctgccctgaacgccacccccatctccaataccgggatcttggagcttcgtcgagtaaggtctgcagaagaaggaggcttcacctgccgcgctcagcacccgctgggcttcctgcaaatttttctgaatctctcagtttactccctcccacagttgctgggcccctcctgctcctgggaggctgagggtctgcactgcagatgctcctttcgagcccggccggccccctccctgtgctggcggcttgaggagaagccgctggaggggaacagcagccagggctcattcaaggtcaactccagctcagctgggccctgggccaacagctccctgatcctccacggggggctcagctccgacctcaaagtcagctgcaaggcctggaacatctatgggtcccagagcggctctgtcctgctgctgcaagggagatcgaaccttgggacaggagtggttcctgcagccctt

SEQ ID NO: 4294 - DNA, 915 bp, Homo Sapiens
caggagcggagattccagctggaggggccagagtcactgacggtgcaggagggtctgtgcgtcctcgtaccctgcagattgcccactacccttccagcctcgtactatggttatggctactggttcctggaaggggctgatgttccagtggccacaaacgacccagacgaagaagtgcaggaggagacccggggccgattccacctcctctgggatcccagaaggaagaactgctccctgagcatcagagatgcccggaggagggacaatgctgcatacttctttcggttgaagtccaaatggatgaaatacggttatacatcttccaagctctctgtgcgtgtgatggccctgacccacaggcccaacatctccatcccagggaccctggagtctggccatcccagcaatctgacctgctctgtgccctgggtctgtgagcaggggacgccccccatcttctcctggatgtcagctgcccccacctccctgggccccaggaccacccagtcctcggtgctcacaatcaccccacggccccaggaccacagcaccaacctcacctgtcaggtgacgttccctggagccggtgtgaccatggagagaaccatccagctcaatgtctcctccttcaaaatcctgcaaaacacctcgtccctccctgtcctggagggccaggctctgcggctgctctgtgatgctgacggcaacccccctgcacacctgagctggttccagggcttccccgccctgaacgccacccccatctccaataccggggtcctggagctgcctcaagtagggtctgcagaagaaggagatttcacctgccgtgctcagcatcctctgggctccctgcaaatctctctgagtctctttgtgcattggaaaccagaaggcagggctggtggtgtc

SEQ ID NO: 4295 - DNA, 1005 bp, Homo Sapiens
cagaagagtaaccggaaggattactcgctgacgatgcagagttccgtgaccgtgcaagagggcatgtgtgtccatgtgcgctgctccttctcctacccagtggacagccagactgactctgacccagttcatggctactggttccgggcagggaatgatataagctggaaggctccagtggccacaaacaacccagcttgggcagtgcaggaggaaactcgggaccgattccacctccttggggacccacagaccaaaaattgcaccctgagcatcagagatgccagaatgagtgatgcggggagatacttctttcgtatggagaaaggaaatataaaatggaattataaatatgaccagctctctgtgaacgtgacagccttgacccacaggcccaacatccttatccccggtaccctggagtctggctgcttccagaatctgacctgctctgtgccctgggcctgtgagcaggggacgccccctatgatctcctggatggggacctctgtgtcccccctgcacccctccaccacccgctcctcagtgctcaccctcatcccacagccccagcaccacggcaccagcctcacctgtcaggtgaccttgcctggggccggcgtgaccacgaacaggaccatccaactcaatgtgtcctaccctcctcagaacttgactgtgactgtcttccaaggagaaggcacagcatccacagctctggggaacagctcatctctttcagtcctagagggccagtctctgcgcttggtctgtgctgttgacagcaatccccctgccaggctgagctggacctggaggagtctgaccctgtacccctcacagccctcaaaccctctggtactggagctgcaagtgcacctgggggatgaaggggaattcacctgtcgagctcagaactctctgggttcccagcacgtttccctgaacctctccctgcaacaggagtacacaggcaaaatgaggcctgtatcaggagtgttgctg

SEQ ID NO: 4296 - DNA, 1041 bp, Homo Sapiens
atggagggagacagacaatatggggatggttacttgctgcaagtgcaggagctggtgacggtgcaggagggcctgtgtgtccatgtgccctgctccttctcctacccccaggatggctggactgactctgacccagttcatggctactggttccgggcaggagacagaccataccaagacgctccagtggccacaaacaacccagacagagaagtgcaggcagagacccagggccgattccaactccttggggacatttggagcaacgactgctccctgagcatcagagacgccaggaagagggataaggggtcatatttctttcggctagagagaggaagcatgaaatggagttacaaatcacagttgaattacaaaactaagcagctgtctgtgtttgtgacagccctgacccataggcctgacatcctcatcctagggaccctagagtctggccaccccaggaacctgacctgctctgtgccctgggcctgtaagcaggggacaccccccatgatctcctggattggggcctccgtgtcctccccgggccccactactgcccgctcctcagtgctcacccttaccccaaagccccaggaccacggcaccagcctcacctgtcaggtgaccttgcctgggacaggtgtgaccacgaccagtaccgtccgcctcgatgtgtcctaccctccttggaacttgaccatgactgtcttccaaggagatgccacagcatccacagccctgggaaatggctcatctctttcagtccttgagggccagtctctgcgcctggtctgtgctgtcaacagcaatccccctgccaggctgagctggacccgggggagcctgaccctgtgcccctcacggtcctcaaaccctgggctgctggagctgcctcgagtgcacgtgagggatgaaggggaattcacctgccgagctcagaacgctcagggctcccagcacatttccctgagcctctccctgcagaatgagggcacaggcacctcaagacctgtatcacaagtgacactggcagca

SEQ ID NO: 4297 - DNA, 993 bp, Homo Sapiens
cagacaagtaaactgctgacgatgcagagttccgtgacggtgcaggaaggcctgtgtgtccatgtgccctgctccttctcctacccctcgcatggctggatttaccctggcccagtagttcatggctactggttccgggaaggggccaatacagaccaggatgctccagtggccacaaacaacccagctcgggcagtgtgggaggagactcgggaccgattccacctccttggggacccacataccgagaattgcaccctgagcatcagagatgccagaagaagtgatgcggggagatacttctttcgtatggagaaaggaagtataaaatggaattataaacatcaccggctctctgtgaatgtgacagccttgacccacaggcccaacatcctcatcccaggcaccctggagtccggctgcccccagaatctgacctgctctgtgccctgggcctgtgagcaggggacaccccctatgatctcctggatagggacctccgtgtcccccctggacccctccaccacccgctcctcggtgctcaccctcatcccacagccccaggaccatggcaccagcctcacctgtcaggtgaccttccctggggccagcgtgaccacgaacaagaccgtccatctcaacgtgtcctacccgcctcagaacttgaccatgactgtcttccaaggagacggcacagtatccacagtcttgggaaatggctcatctctgtcactcccagagggccagtctctgcgcctggtctgtgcagttgatgcagttgacagcaatccccctgccaggctgagcctgagctggagaggcctgaccctgtgcccctcacagccctcaaacccgggggtgctggagctgccttgggtgcacctgagggatgaagctgaattcacctgcagagctcagaaccctctcggctctcagcaggtctacctgaacgtctccctgcagagcaaagccacatcaggagtgactcagggg

SEQ ID NO: 4298 - DNA, 1026 bp, Homo Sapiens
gaggaggagctgcaggtgattcagcctgacaagtccgtatcagttgcagctggagagtcggccattctgcactgcactgtgacctccctgatccctgtggggcccatccagtggttcagaggagctggaccagcccgggaattaatctacaatcaaaaagaaggccacttcccccgggtaacaactgtttcagagtccacaaagagagaaaacatggacttttccatcagcatcagtaacatcaccccagcagatgccggcacctactactgtgtgaagttccggaaagggagccctgacacggagtttaagtctggagcaggcactgagctgtctgtgcgtgccaaaccctctgcccccgtggtatcgggccctgcggcgagggccacacctcagcacacagtgagcttcacctgcgagtcccacggcttctcacccagagacatcaccctgaaatggttcaaaaatgggaatgagctctcagacttccagaccaacgtggaccccgtaggagagagcgtgtcctacagcatccacagcacagccaaggtggtgctgacccgcgaggacgttcactctcaagtcatctgcgaggtggcccacgtcaccttgcagggggaccctcttcgtgggactgccaacttgtctgagaccatccgagttccacccaccttggaggttactcaacagcccgtgagggcagagaaccaggtgaatgtcacctgccaggtgaggaagttctacccccagagactacagctgacctggttggagaatggaaacgtgtcccggacagaaacggcctcaaccgttacagagaacaaggatggtacctacaactggatgagctggctcctggtgaatgtatctgcccacagggatgatgtgaagctcacctgccaggtggagcatgacgggcagccagcggtcagcaaaagccatgacctgaaggtctcagcccacccgaaggagcagggctcaaataccgccgctgagaacactggatctaatgaacggaacatctat

SEQ ID NO: 4299 - DNA, 1026 bp, Homo Sapiens
gaggacgagctacaggtgattcagcctgaaaagtccgtatcagttgcagctggagagtcggccactctgcgctgtgctatgacgtccctgatccctgtggggcccatcatgtggtttagaggagctggagcaggccgggaattaatctacaatcagaaagaaggccacttcccacgggtaacaactgtttcagaactcacaaagagaaacaacctggacttttccatcagcatcagtaacatcaccccagcagacgccggcacctactactgtgtgaagttccggaaagggagccctgacgacgtggagtttaagtctggagcaggcactgagctgtctgtgcgcgccaaaccctctgcccccgtggtatcgggccctgcggtgagggccacacctgagcacacagtgagcttcacctgcgagtcccatggcttctctcccagagacatcaccctgaaatggttcaaaaatgggaatgagctctcagacttccagaccaacgtggaccccgcaggagacagtgtgtcctacagcatccacagcacagccagggtggtgctgacccgtggggacgttcactctcaagtcatctgcgagatagcccacatcaccttgcagggggaccctcttcgtgggactgccaacttgtctgaggccatccgagttccacccaccttggaggttactcaacagcccatgagggcagagaaccaggcaaacgtcacctgccaggtgagcaatttctacccccggggactacagctgacctggttggagaatggaaatgtgtcccggacagaaacagcttcgaccctcatagagaacaaggatggcacctacaactggatgagctggctcctggtgaacacctgtgcccacagggacgatgtggtgctcacctgtcaggtggagcatgatgggcagcaagcagtcagcaaaagctatgccctggagatctcagcgcaccagaaggagcacggctcagatatcacccatgaagcagcgctggctcctactgctccactc

SEQ ID NO: 4300 - DNA, 765 bp, Homo Sapiens
caaagcagccgtaatgactggcaagtacttcaacccgagggtccgatgctggttgcggagggagagacccttctgttacgttgcatggttgtgggatcttgtactgacgggatgataaagtgggtcaaagtctccacgcaagaccaacaagagatctacaattttaagagaggatcttttccgggggtcatgccgatgatacagcgtacttctgagcccctgaattgtgattattcaatctacattcataacgtaacgagggagcatacaggcacctatcactgcgtgagattcgatgggttaagtgagcattctgagatgaagtctgatgaaggcacttctgttctggtcaagggcgcgggggaccccgagcctgatctttggatcattcagcctcaagaacttgttctaggtaccacgggcgacaccgttttcttgaactgtacagttctaggagatggcccgcccggtccaatccgttggtttcaaggggctggtctaagtagggaagcaatttacaactttggaggtatatcccatccgaaggagacggcggtacaagcatccaataatgattttagcatcctacttcagaacgtgtccagtgaggatgccggtacatattattgcgtcaaattccagcgtaagcccaatagacaatacttgtcaggacagggtacgtctttgaaggtgaaagccaagagtactagctccaaagaggctgagtttacgagtgagcccgcgactgaaatgtcccccacaggg

SEQ ID NO: 4301 - DNA, 996 bp, Homo Sapiens
gaggaggagctacagatgattcagcctgagaagctcctgttggtcacagttggaaagacagccactctgcactgcactgtgacctccctgcttcccgtgggacccgtcctgtggttcagaggagttggaccaggccgggaattaatctacaatcaaaaagaaggccacttccccagggtaacaacagtttcagacctcacaaagagaaacaacatggacttttccatccgcatcagtagcatcaccccagcagatgtcggcacatactactgtgtgaagtttcgaaaagggagccctgagaacgtggagtttaagtctggaccaggcactgagatggctttgggtgccaaaccctctgcccccgtggtattgggccctgcggcgaggaccacacctgagcatacagtgagtttcacctgtgagtcccatggcttctctcccagagacatcaccctgaaatggttcaaaaatgggaatgagctctcagacttccagaccaacgtggaccccacaggacagagtgtggcctacagcatccgcagcacagccagggtggtactggacccctgggacgttcgctctcaggtcatctgcgaggtggcccatgtcaccttgcagggggaccctcttcgtgggactgccaacttgtctgaggccatccgagttccacccaccttggaggttactcaacagcccatgagggtggggaaccaggtaaacgtcacctgccaggtgaggaagttctacccccagagcctacagctgacctggtcggagaatggaaacgtgtgccagagagaaacagcctcgacccttacagagaacaaggatggtacctacaactggacaagctggttcctggtgaacatatctgaccaaagggatgatgtggtcctcacctgccaggtgaagcatgatgggcagctggcggtcagcaaacgccttgccctagaggtcacagtccaccagaaggaccagagctcagatgctacccct

SEQ ID NO: 4302 - DNA, 651 bp, Homo Sapiens
gcaagctacggaacaggtgggcgcatgatgaactgcccaaagattctccggcagttgggaagcaaagtgctgctgcccctgacatatgaaaggataaataagagcatgaacaaaagcatccacattgtcgtcacaatggcaaaatcactggagaacagtgtcgagaacaaaatagtgtctcttgatccatccgaagcaggccctccacgttatctaggagatcgctacaagttttatctggagaatctcaccctggggatacgggaaagcaggaaggaggatgagggatggtaccttatgaccctggagaaaaatgtttcagttcagcgcttttgcctgcagttgaggctttatgagcaggtctccactccagaaattaaagttttaaacaagacccaggagaacgggacctgcaccttgatactgggctgcacagtggagaagggggaccatgtggcttacagctggagtgaaaaggcgggcacccacccactgaacccagccaacagctcccacctcctgtccctcaccctcggcccccagcatgctgacaatatctacatctgcaccgtgagcaaccctatcagcaacaattcccagaccttcagcccgtggcccggatgcaggacagacccctcagaaacaaaacca

SEQ ID NO: 4303 - DNA, 615 bp, Homo Sapiens
caaagcagcttaaccccattgatggtgaacgggattctgggggagtcagtaactcttcccctggagtttcctgcaggagagaaggtcaacttcatcacttggcttttcaatgaaacatctcttgccttcatagtaccccatgaaaccaaaagtccagaaatccacgtgactaatccgaaacagggaaagcgactgaacttcacccagtcctactccctgcaactcagcaacctgaagatggaagacacaggctcttacagagcccagatatccacaaagacctctgcaaagctgtccagttacactctgaggatattaagacaactgaggaacatacaagttaccaatcacagtcagctatttcagaatatgacctgtgagctccatctgacttgctctgtggaggatgcagatgacaatgtctcattcagatgggaggccttgggaaacacactttcaagtcagccaaacctcactgtctcctgggaccccaggatttccagtgaacaggactacacctgcatagcagagaatgctgtcagtaatttatccttctctgtctctgcccagaagctttgcgaagatgttaaaattcaatatacagataccaaaatg

SEQ ID NO: 4304 - DNA, 612 bp, Homo Sapiens
tctggacccgtgaaagagctggtcggttccgttggtggggccgtgactttccccctgaagtccaaagtaaagcaagttgactctattgtctggaccttcaacacaacccctcttgtcaccatacagccagaagggggcactatcatagtgacccaaaatcgtaatagggagagagtagacttcccagatggaggctactccctgaagctcagcaaactgaagaagaatgactcagggatctactatgtggggatatacagctcatcactccagcagccctccacccaggagtacgtgctgcatgtctacgagcacctgtcaaagcctaaagtcaccatgggtctgcagagcaataagaatggcacctgtgtgaccaatctgacatgctgcatggaacatggggaagaggatgtgatttatacctggaaggccctggggcaagcagccaatgagtcccataatgggtccatcctccccatctcctggagatggggagaaagtgatatgaccttcatctgcgttgccaggaaccctgtcagcagaaacttctcaagccccatccttgccaggaagctctgtgaaggtgctgctgatgacccagattcctccatg

SEQ ID NO: 4305 - DNA, 633 bp, Homo Sapiens
gcccaagtgctgagcaaagtcgggggctcggtgctgctggtggcagcgcgtccccctggcttccaagtccgtgaggctatctggcgatctctctggccttcagaagagctcctggccacgtttttccgaggctccctggagactctgtaccattcccgcttcctgggccgagcccagctacacagcaacctcagcctggagctcgggccgctggagtctggagacagcggcaacttctccgtgttgatggtggacacaaggggccagccctggacccagaccctccagctcaaggtgtacgatgcagtgcccaggcccgtggtacaagtgttcattgctgtagaaagggatgctcagccctccaagacctgccaggttttcttgtcctgttgggcccccaacatcagcgaaataacctatagctggcgacgggagacaaccatggactttggtatggaaccacacagcctcttcacagacggacaggtgctgagcatttccctgggaccaggagacagagatgtggcctattcctgcattgtctccaaccctgtcagctgggacttggccacagtcacgccctgggatagctgtcatcatgaggcagcaccagggaaggcctcctacaaagat

SEQ ID NO: 4306 - DNA, 654 bp, Homo Sapiens
aggagactctggagatggtgtggatccgaggaagtggttgcggtccttcaggagtccatcagcctccccctggaaataccaccagatgaagaggttgagaacatcatctggtcctctcacaaaagtcttgccactgtggtgccagggaaagagggacatccagctaccatcatggtgaccaatccacactaccagggccaagtgagcttcctggaccccagctattccctgcatatcagcaatctgagctgggaggattcagggctttaccaagctcaagtcaacctgagaacatcccagatctctaccatgcagcagtacaatctatgtgtctaccgatggctgtcagagccccagatcactgtgaactttgagagttctggggaaggtgcctgcagtatgtccctggtgtgctctgtggagaaggcaggcatggatatgacctacagctggctctcccggggggatagcacttatacattccatgaaggccctgtcctcagcacatcctggaggccgggggacagtgccctctcctacacctgcagagccaacaaccccatcagcaacgtcagttcttgccccatccctgatgggcccttctatgcagatcctaactatgcttctgagaagccttcaacagccttctgcctc

SEQ ID NO: 4307 - DNA, 4497 bp, Homo Sapiens
cagtgctcttgctcgggcagcacagtggactgtcacgggctggcgctgcgcagcgtgcccaggaatatcccccgcaacaccgagagactggatttaaatggaaataacatcacaagaattacgaagacagattttgctggtcttagacatctaagagttcttcagcttatggagaataagattagcaccattgaaagaggagcattccaggatcttaaagaactagagagactgcgtttaaacagaaatcaccttcagctgtttcctgagttgctgtttcttgggactgcgaagctatacaggcttgatctcagtgaaaaccaaattcaggcaatcccaaggaaagctttccgtggggcagttgacataaaaaatttgcaactggattacaaccagatcagctgtattgaagatggggcattcagggctctccgggacctggaagtgctcactctcaacaataacaacattactagactttctgtggcaagtttcaaccatatgcctaaacttaggacttttcgactgcattcaaacaacctgtattgtgactgccacctggcctggctctccgactggcttcgccaaaggcctcgggttggtctgtacactcagtgtatgggcccctcccacctgagaggccataatgtagccgaggttcaaaaacgagaatttgtctgcagtggtcaccagtcatttatggctccttcttgtagtgttttgcactgccctgccgcctgtacctgtagcaacaatatcgtagactgtcgtgggaaaggtctcactgagatccccacaaatcttccagagaccatcacagaaatacgtttggaacagaacacaatcaaagtcatccctcctggagctttctcaccatataaaaagcttagacgaattgacctgagcaataatcagatctctgaacttgcaccagatgctttccaaggactacgctctctgaattcacttgtcctctatggaaataaaatcacagaactccccaaaagtttatttgaaggactgttttccttacagctcctattattgaatgccaacaagataaactgccttcgggtagatgcttttcaggatctccacaacttgaaccttctctccctatatgacaacaagcttcagaccatcgccaaggggaccttttcacctcttcgggccattcaaactatgcatttggcccagaacccctttatttgtgactgccatctcaagtggctagcggattatctccataccaacccgattgagaccagtggtgcccgttgcaccagcccccgccgcctggcaaacaaaagaattggacagatcaaaagcaagaaattccgttgttcagctaaagaacagtatttcattccaggtacagaagattatcgatcaaaattaagtggagactgctttgcggatctggcttgccctgaaaagtgtcgctgtgaaggaaccacagtagattgctctaatcaaaagctcaacaaaatcccggagcacattccccagtacactgcagagttgcgtctcaataataatgaatttaccgtgttggaagccacaggaatctttaagaaacttcctcaattacgtaaaataaactttagcaacaataagatcacagatattgaggagggagcatttgaaggagcatctggtgtaaatgaaatacttcttacgagtaatcgtttggaaaatgtgcagcataagatgttcaagggattggaaagcctcaaaactttgatgttgagaagcaatcgaataacctgtgtggggaatgacagtttcataggactcagttctgtgcgtttgctttctttgtatgataatcaaattactacagttgcaccaggggcatttgatactctccattctttatctactctaaacctcttggccaatccttttaactgtaactgctacctggcttggttgggagagtggctgagaaagaagagaattgtcacgggaaatcctagatgtcaaaaaccatacttcctgaaagaaatacccatccaggatgtggccattcaggacttcacttgtgatgacggaaatgatgacaatagttgctccccactttctcgctgtcctactgaatgtacttgcttggatacagtcgtccgatgtagcaacaagggtttgaaggtcttgccgaaaggtattccaagagatgtcacagagttgtatctggatggaaaccaatttacactggttcccaaggaactctccaactacaaacatttaacacttatagacttaagtaacaacagaataagcacgctttctaatcagagcttcagcaacatgacccagctcctcaccttaattcttagttacaaccgtctgagatgtattcctcctcgcacctttgatggattaaagtctcttcgattactttctctacatggaaatgacatttctgttgtgcctgaaggtgctttcaatgatctttctgcattatcacatctagcaattggagccaaccctctttactgtgattgtaacatgcagtggttatccgactgggtgaagtcggaatataaggagcctggaattgctcgttgtgctggtcctggagaaatggcagataaacttttactcacaactccctccaaaaaatttacctgtcaaggtcctgtggatgtcaatattctagctaagtgtaacccctgcctatcaaatccgtgtaaaaatgatggcacatgtaatagtgatccagttgacttttaccgatgcacctgtccatatggtttcaaggggcaggactgtgatgtcccaattcatgcctgcatcagtaacccatgtaaacatggaggaacttgccacttaaaggaaggagaagaagatggattctggtgtatttgtgctgatggatttgaaggagaaaattgtgaagtcaacgttgatgattgtgaagataatgactgtgaaaataattctacatgtgtcgatggcattaataactacacatgcctttgcccacctgagtatacaggtgagttgtgtgaggagaagctggacttctgtgcccaggacctgaacccctgccagcacgattcaaagtgcatcctaactccaaagggattcaaatgtgactgcacaccagggtacgtaggtgaacactgcgacatcgattttgacgactgccaagacaacaagtgtaaaaacggagcccactgcacagatgcagtgaacggctatacgtgcatatgccccgaaggttacagtggcttgttctgtgagttttctccacccatggtcctccctcgtaccagcccctgtgataattttgattgtcagaatggagctcagtgtatcgtcagaataaatgagccaatatgtcagtgtttgcctggctatcagggagaaaagtgtgaaaaattggttagtgtgaattttataaacaaagagtcttatcttcagattccttcagccaaggttcggcctcagacgaacataacacttcagattgccacagatgaagacagcggaatcctcctgtataagggtgacaaagaccatatcgcggtagaactctatcgggggcgtgttcgtgccagctatgacaccggctctcatccagcttctgccatttacagtgtggagacaatcaatgatggaaacttccacattgtggaactacttgccttggatcagagtctctctttgtccgtggatggtgggaaccccaaaatcatcactaacttgtcaaagcagtccactctgaattttgactctccactctatgtaggaggcatgccagggaagagtaacgtggcatctctgcgccaggcccctgggcagaacggaaccagcttccacggctgcatccggaacctttacatcaacagtgagctgcaggacttccagaaggtgccgatgcaaacaggcattttgcctggctgtgagccatgccacaagaaggtgtgtgcccatggcacatgccagcccagcagccaggcaggcttcacctgcgagtgccaggaaggatggatggggcccctctgtgaccaacggaccaatgacccttgccttggaaataaatgcgtacatggcacctgcttgcccatcaatgcgttctcctacagctgtaagtgcttggagggccatggaggtgtcctctgtgatgaagaggaggatctgtttaacccatgccaggcgatcaagtgcaagcatgggaagtgcaggctttcaggtctggggcagccctactgtgaatgcagcagtggatacacgggggacagctgtgatcgagaaatctcttgtcgaggggaaaggataagagattattaccaaaagcagcagggctatgctgcttgccaaacaaccaagaaggtgtcccgattagagtgcagaggtgggtgtgcaggagggcagtgctgtggaccgctgaggagcaagcggcggaaatactctttcgaatgcactgacggctcctcctttgtggacgaggttgagaaagtggtgaagtgcggctgtacgaggtgtgtgtcc

SEQ ID NO: 4308 - DNA, 1584 bp, Homo Sapiens
aacccagatgactgtgaggacaacgactgcgaaaacaatgccacctgcgtggacgggatcaacaactacgtgtgtatctgtccgcctaactacacaggtgagctatgcgacgaggtgattgaccactgtgtgcctgagctgaacctctgtcagcatgaggccaagtgcatccccctggacaaaggattcagctgcgagtgtgtccctggctacagcgggaagctctgtgagacagacaatgatgactgtgtggcccacaagtgccgccacggggcccagtgcgtggacacaatcaatggctacacatgcacctgcccccagggcttcagtggacccttctgtgaacaccccccacccatggtcctactgcagaccagcccatgcgaccagtacgagtgccagaacggggcccagtgcatcgtggtgcagcaggagcccacctgccgctgcccaccaggcttcgccggccccagatgcgagaagctcatcactgtcaacttcgtgggcaaagactcctacgtggaactggcctccgccaaggtccgaccccaggccaacatctccctgcaggtggccactgacaaggacaacggcatccttctctacaaaggagacaatgaccccctggcactggagctgtaccagggccacgtgcggctggtctatgacagcctgagttcccctccaaccacagtgtacagtgtggagacagtgaatgatgggcagtttcacagtgtggagctggtgacgctaaaccagaccctgaacctagtagtggacaaaggaactccaaagagcctggggaagctccagaagcagccagcagtgggcatcaacagccccctctaccttggaggcatccccacctccaccggcctctccgccttgcgccagggcacggaccggcctctaggcggcttccacggatgcatccatgaggtgcgcatcaacaacgagctgcaggacttcaaggccctcccaccacagtccctgggggtgtcaccaggctgcaagtcctgcaccgtgtgcaagcacggcctgtgccgctccgtggagaaggacagcgtggtgtgcgagtgccgcccaggctggaccggcccactctgcgatcaggaggcccgggacccctgcctcggccacagatgccaccatggaaaatgtgtggcaactgggacctcatacatgtgcaagtgtgccgagggctatggaggggacttgtgtgacaacaagaatgactctgccaatgcctgctcagccttcaagtgtcaccatgggcagtgccacatctcagaccaaggggagccctactgcctgtgccagcccggctttagcggcgagcactgccaacaagagaatccgtgcctgggacaagtagtccgagaggtgatccgccgccagaaaggttatgcatcatgtgccacagcctccaaggtgcccatcatggaatgtcgtgggggctgtgggccccagtgctgccagcccacccgcagcaagcggcggaaatacgtcttccagtgcacggatggctcctcgtttgtagaagaggtggagagacacttagagtgcggctgcctcgcgtgttcc

SEQ ID NO: 4309 - DNA, 1815 bp, Homo Sapiens
aacgttacaggggacgtttgcaaagagaagatctgttcctgcaatgagatagaaggggacctacacgtagactgtgaaaaaaagggcttcacaagtctgcagcgtttcactgccccgacttcccagttttaccatttatttctgcatggcaattccctcactcgacttttccctaatgagttcgctaacttttataatgcggttagtttgcacatggaaaacaatggcttgcatgaaatcgttccgggggcttttctggggctgcagctggtgaaaaggctgcacatcaacaacaacaagatcaagtcttttcgaaagcagacttttctggggctggacgatctggaatatctccaggctgattttaatttattacgagatatagacccgggggccttccaggacttgaacaagctggaggtgctcattttaaatgacaatctcatcagcaccctacctgccaacgtgttccagtatgtgcccatcacccacctcgacctccggggtaacaggctgaaaacgctgccctatgaggaggtcttggagcaaatccctggtattgcggagatcctgctagaggataacccttgggactgcacctgtgatctgctctccctgaaagaatggctggaaaacattcccaagaatgccctgatcggccgagtggtctgcgaagcccccaccagactgcagggtaaagacctcaatgaaaccaccgaacaggacttgtgtcctttgaaaaaccgagtggattctagtctcccggcgccccctgcccaagaagagacctttgctcctggacccctgccaactcctttcaagacaaatgggcaagaggatcatgccacaccagggtctgctccaaacggaggtacaaagatcccaggcaactggcagatcaaaatcagacccacagcagcgatagcgacgggtagctccaggaacaaacccttagctaacagtttaccctgccctgggggctgcagctgcgaccacatcccagggtcgggtttaaagatgaactgcaacaacaggaacgtgagcagcttggctgatttgaagcccaagctctctaacgtgcaggagcttttcctacgagataacaagatccacagcatccgaaaatcgcactttgtggattacaagaacctcattctgttggatctgggcaacaataacatcgctactgtagagaacaactctttcaagaaccttttggacctcaggtggctatacatggatagcaattacctggacacgctgtcccgggagaaattcgcggggctgcaaaacctagagtacctgaacgtggagtacaacgctatccagctcatcctcccgggcactttcaatgccatgcccaaactgaggatcctcattctcaacaacaacctgctgaggtccctgcctgtggacgtgttcgctggggtctcgctctctaaactcagcctgcacaacaattacttcatgtacctcccggtggcaggggtgctggaccagttaacctccatcatccagatagacctccacggaaacccctgggagtgctcctgcacaattgtgcctttcaagcagtgggcagaacgcttgggttccgaagtgctgatgagcgacctcaagtgtgagacgccggtgaacttctttagaaaggatttcatgctcctctccaatgacgagatctgccctcagctgtacgctaggatctcgcccacgttaacttcgcacagtaaaaacagcactgggttggcggagaccgggacgcactccaactcctacctagacaccagcagggtgtccatctcggtgttggtcccg

SEQ ID NO: 4310 - DNA, 1800 bp, Homo Sapiens
cgcaaaactgccaaagacatttgcaagatccgctgtctgtgcgaagaaaaggaaaacgtactgaatatcaactgtgagaacaaaggatttacaacagttagcctgctccagcccccccagtatcgaatctatcagctttttctcaatggaaacctcttgacaagactgtatccaaacgaatttgtcaattactccaacgcggtgactcttcacctaggtaacaacgggttacaggagatccgaacgggggcattcagtggcctgaaaactctcaaaagactgcatctcaacaacaacaagcttgagatattgagggaggacaccttcctaggcctggagagcctggagtatctccaggccgactacaattacatcagtgccatcgaggctggggcattcagcaaacttaacaagctcaaagtgctcatcctgaatgacaaccttctgctttcactgcccagcaatgtgttccgctttgtcctgctgacccacttagacctcagggggaataggctaaaagtaatgccttttgctggcgtccttgaacatattggagggatcatggagattcagctggaggaaaatccatggaattgcacttgtgacttacttcctctcaaggcctggctagacaccataactgtttttgtgggagagattgtctgtgagactccctttaggttgcatgggaaagacgtgacccagctgaccaggcaagacctctgtcccagaaaaagtgccagtgattccagtcagaggggcagccatgctgacacccacgtccaaaggctgtcacctacaatgaatcctgctctcaacccaaccagggctccgaaagccagccggccgcccaaaatgagaaatcgtccaactccccgagtgactgtgtcaaaggacaggcaaagttttggacccatcatggtgtaccagaccaagtctcctgtgcctctcacctgtcccagcagctgtgtctgcacctctcagagctcagacaatggtctgaatgtaaactgccaagaaaggaagttcactaatatctctgacctgcagcccaaaccgaccagtccaaagaaactctacctaacagggaactatcttcaaactgtctataagaatgacctcttagaatacagttctttggacttactgcacttaggaaacaacaggattgcagtcattcaggaaggtgcctttacaaacctgaccagtttacgcagactttatctgaatggcaattaccttgaagtgctgtacccttctatgtttgatggactgcagagcttgcaatatctctatttagagtataatgtcattaaggaaattaagcctctgacctttgatgctttgattaacctacagctactgtttctgaacaacaaccttcttcggtccttacctgataatatatttggggggacggccctaaccaggctgaatctgagaaacaaccatttttctcacctgcccgtgaaaggggttctggatcagctcccggctttcatccagatagatctgcaggagaacccctgggactgtacctgtgacatcatggggctgaaagactggacagaacatgccaattcccctgtcatcattaatgaggtgacttgcgaatctcctgctaagcatgcaggggagatactaaaatttctggggagggaggctatctgtccagacagcccaaacttgtcagatggaaccgtcttgtcaatgaatcacaatacagacacacctcggtcgcttagtgtgtctcctagttcctatcctgaactacacactgaagttccactgtctgtctta

SEQ ID NO: 4311 - DNA, 1878 bp, Homo Sapiens
accccgattcccctaatagaggactcagaggaaatagatgagccctgttttgatccatgctactgtgaagttaaagaaagcctctttcatatacattgtgacagtaaaggatttacaaatattagtcagattaccgagttctggtcaagaccttttaaactgtatctgcagaggaattctatgaggaaattatataccaacagttttcttcatttgaataatgctgtgtctattaatcttgggaacaatgcattgcaggacattcagactggagctttcaatggtcttaagattttaaagagactatatctacatgaaaacaaactagatgtcttcagaaatgacaccttccttggcttggaaagtctagaatatctgcaggcagattacaatgtcattaaacgtattgagagtggggcatttcggaacctaagtaaattgagggttctgattttaaatgataatctcatccccatgcttccaaccaatttatttaaggctgtctctttaacccatttggacctacgtggaaataggttaaaggttcttttttaccgaggaatgctagatcacattggcagaagcctgatggagctccagctggaagaaaacccttggaactgtacatgtgaaattgtacaactgaagagttggctggaacgcattccttatactgccctggtgggagacattacctgtgagacccctttccacttccatggaaaggacctacgagaaatcaggaagacagaactctgtcccttgttgtctgactctgaggtagaggctagtttgggaattccacattcgtcatcaagtaaggagaatgcatggccaactaagccttcctcaatgctatcctctgttcattttactgcttcttctgtcgaatacaagtcctcaaataaacagcctaagcccaccaaacagcctcgaacaccaaggccaccctccacctcccaagctttatatcctggtccaaaccagcctcccattgctccttatcagaccagaccaccaatccccattatatgccccactgggtgtacctgtaatttgcacatcaatgaccttggcttgactgtcaactgcaaagagcgaggatttaataacatttctgaacttcttccaaggcccttgaatgccaagaaactgtatctgagtagcaatctgattcagaaaatataccgttctgatttttggaatttttcttccttggatctcttgcatctggggaacaatcgtatttcctatgtccaagatggggcctttatcaacttgcccaacttaaagagcctcttccttaatggcaacgatatagagaagctgacaccaggcatgttccgaggcctacagagtttgcactacttgtactttgagttcaatgtcatccgggaaatccagcctgcagccttcagcctcatgcccaacttgaagctgctattcctcaataataacttactgaggactctgccaacagacgcctttgctggcacatccctggcccggctcaacctgaggaagaactacttcctctatcttcccgtggctggtgtcctggaacacttgaatgccattgtccagatagacctcaatgagaatccttgggactgcacctgtgacctggtcccctttaaacagtggatcgaaaccatcagctcagtcagtgtggttggtgatgtgctttgcaggagccctgagaacctcacgcaccgtgatgtgcgcactattgagctggaagttctttgcccagagatgctgcacgttgcaccagctggagaatccccagcccagcctggagattctcaccttattggggcaccaaccagtgcatcaccttatgagttttctcctcctgggggccctgtgccactttct

SEQ ID NO: 4312 - DNA, 1800 bp, Homo Sapiens
gattctgacatatcggtggaaatttgcaatgtgtgttcctgcgtgtcagttgagaatgtgctctatgtcaactgtgagaaggtttcagtctacagaccaaatcagctgaaaccaccttggtctaatttttatcacctcaatttccaaaataattttttaaatattctgtatccaaatacattcttgaatttttcacatgcagtctccctgcatctggggaataataaactgcagaacattgagggaggagcctttcttgggctcagtgcattaaagcagttgcacttgaacaacaatgaattaaagattctccgagctgacactttccttggcatagagaacttggagtatctccaggctgactacaatttaatcaagtatattgaacgaggagccttcaataagctccacaaactgaaagttctcattcttaatgacaatctgatttcattccttcctgataatattttccgattcgcatctttgacccatctggatatacgagggaacagaatccagaagctcccttatatcggggttctggaacacattggccgtgtcgttgaattgcaactggaagataacccttggaactgtagctgtgatttattgcccttaaaagcttggctggagaacatgccatataacatttacataggagaagctatctgtgaaactcccagtgacttatatggaaggcttttaaaagaaaccaacaaacaagagctatgtcccatgggcaccggcagtgattttgacgtgcgcatcctgcctccatctcagctggaaaatggctacaccactcccaatggtcacactacccaaacatctttacacagattagtaactaaaccaccaaaaacaacaaatccttccaagatctctggaatcgttgcaggcaaagccctctccaaccgcaatctcagtcagattgtgtcttaccaaacaagggtgcctcctctaacaccttgcccggcaccttgcttctgcaaaacacacccttcagatttgggactaagtgtgaactgccaagagaaaaatatacagtctatgtctgaactgataccgaaacctttaaatgcgaagaagctgcacgtcaatggcaatagcatcaaggatgtggacgtatcagacttcactgactttgaaggactggatttgcttcatttaggcagcaatcaaattacagtgattaagggagacgtatttcacaatctcactaatttacgcaggctatatctcaatggcaatcaaattgagagactctatcctgaaatattttcaggtcttcataacctgcagtatctgtatttggaatacaatttgattaaggaaatctcagcaggcacctttgactccatgccaaatttgcagttactgtacttaaacaataatctcctaaagagcctgcctgtttacatcttttccggagcacccttagctagactgaacctgaggaacaacaaattcatgtacctgcctgtcagtggggtccttgatcagttgcaatctcttacacagattgacttggagggcaacccatgggactgtacttgtgacttggtggcattaaagctgtgggtggagaagttgagcgacgggattgttgtgaaagaactgaaatgtgagacgcctgttcagtttgccaacattgaactgaagtccctcaaaaatgaaatcttatgtcccaaacttttaaataagccgtctgcaccattcacaagccctgcacctgccattacattcaccactcctttgggtcccattcgaagtcctcctggtgggccagtgcctctgtct

SEQ ID NO: 4313 - DNA, 1872 bp, Homo Sapiens
atcgattattatggggaaatctgtgacaatgcatgtccttgtgaggaaaaggacggcattttaactgtgagctgtgaaaaccgggggatcatcagtctctctgaaattagccctccccgtttcccaatctaccacctcttgttgtccggaaaccttttgaaccgtctctatcccaatgagtttgtcaattacactggggcttcaattttgcatctaggtagcaatgttatccaggacattgagaccggggctttccatgggctacggggtttgaggagattgcatctaaacaataataaactggaacttctgcgagatgataccttccttggcttggagaacctggagtacctacaggtcgattacaactacatcagcgtcattgaacccaatgcttttgggaaactgcatttgttgcaggtgcttatcctcaatgacaatcttttgtccagtttacccaacaatcttttccgttttgtgcccttaacgcacttggacctccgggggaaccggctgaaacttctgccctacgtggggctcttgcagcacatggataaagttgtggagctacagctggaggaaaacccttggaattgttcttgtgagctgatctctctaaaggattggttggacagcatctcctattcagccctggtgggggatgtagtttgtgagacccccttccgcttacacggaagggacttggacgaggtatccaagcaggaactttgcccaaggagacttatttctgactacgagatgaggccgcagacgcctttgagcaccacggggtatttacacaccaccccggcgtcagtgaattctgtggccacttcttcctctgctgtttacaaaccccctttgaagccccctaaggggactcgccaacccaacaagcccagggtgcgccccacctctcggcagccctctaaggacttgggctacagcaactatggccccagcatcgcctatcagaccaaatccccggtgcctttggagtgtcccaccgcgtgctcttgcaacctgcagatctctgatctgggcctcaacgtaaactgccaggagcgaaagatcgagagcatcgctgaactgcagcccaagccctacaatcccaagaaaatgtatctgacagagaactacatcgctgtcgtgcgcaggacagacttcctggaggccacggggctggacctcctgcacctggggaataaccgcatctcgatgatccaggaccgcgctttcggggatctcaccaacctgaggcgcctctacctgaatggcaacaggatcgagaggctgagcccggagttattctatggcctgcagagcctgcagtatctcttcctccagtacaatctcatccgcgagattcagtctggaacttttgacccggtcccaaacctccagctgctattcttgaataacaacctcctgcaggccatgccctcaggcgtcttctctggcttgaccctcctcaggctaaacctgaggagtaaccacttcacctccttgccagtgagtggagttttggaccagctgaagtcactcatccaaatcgacctgcatgacaatccttgggattgtacctgtgacattgtgggcatgaagctgtgggtggagcagctcaaagtgggcgtcctagtggacgaggtgatctgtaaggcgcccaaaaaattcgctgagaccgacatgcgctccattaagtcggagctgctgtgccctgactattcagatgtagtagtttccacgcccacaccctcctctatccaggtccctgcgaggaccagcgccgtgactcctgcggtccggttgaatagcaccggggcccccgcgagcttgggcgcaggcggaggggcgtcgtcggtgcccttgtct

SEQ ID NO: 4314 - DNA, 1746 bp, Homo Sapiens
tccagaggctcttgtgattctctttgcaattgtgaggaaaaagatggcacaatgctaataaattgtgaagcaaaaggtatcaagatggtatctgaaataagtgtgccaccatcacgacctttccaactaagcttattaaataacggcttgacgatgcttcacacaaatgacttttctgggcttaccaatgctatttcaatacaccttggatttaacaatattgcagatattgagataggtgcatttaatggccttggcctcctgaaacaacttcatatcaatcacaattctttagaaattcttaaagaggatactttccatggactggaaaacctggaattcctgcaagcagataacaattttatcacagtgattgaaccaagtgcctttagcaagctcaacagactcaaagtgttaattttaaatgacaatgctattgagagtcttcctccaaacatcttccgatttgttcctttaacccatctagatcttcgtggaaatcaattacaaacattgccttatgttggttttctcgaacacattggccgaatattggatcttcagttggaggacaacaaatgggcctgcaattgtgacttattgcagttaaaaacttggttggagaacatgcctccacagtctataattggtgatgttgtctgcaacagccctccattttttaaaggaagtatactcagtagactaaagaaggaatctatttgccctactccaccagtgtatgaagaacatgaggatccttcaggatcattacatctggcagcaacatcttcaataaatgatagtcgcatgtcaactaagaccacgtccattctaaaactacccaccaaagcaccaggtttgataccttatattacaaagccatccactcaacttccaggaccttactgccctattccttgtaactgcaaagtcctatccccatcaggacttctaatacattgtcaggagcgcaacattgaaagcttatcagatctgagacctcctccgcaaaatcctagaaagctcattctagcgggaaatattattcacagtttaatgaagtctgatctagtggaatatttcactttggaaatgcttcacttgggaaacaatcgtattgaagttcttgaagaaggatcgtttatgaacctaacgagattacaaaaactctatctaaatggtaaccacctgaccaaattaagtaaaggcatgttccttggtctccataatcttgaatacttatatcttgaatacaatgccattaaggaaatactgccaggaacctttaatccaatgcctaaacttaaagtcctgtatttaaataacaacctcctccaagttttaccaccacatattttttcaggggttcctctaactaaggtaaatcttaaaacaaaccagtttacccatctacctgtaagtaatattttggatgatcttgatttgctaacccagattgaccttgaggataacccctgggactgctcctgtgacctggttggactgcagcaatggatacaaaagttaagcaagaacacagtgacagatgacatcctctgcacttcccccgggcatctcgacaaaaaggaattgaaagccctaaatagtgaaattctctgtccaggtttagtaaataacccatccatgccaacacagactagttaccttatggtcaccactcctgcaacaacaacaaatacggctgatactattttacgatctcttacggacgctgtgccactgtct

SEQ ID NO: 4315 - DNA, 243 bp, Homo Sapiens
ctcaagtgctacacctgcaaggagcccatgaccagtgcttcctgcaggaccattacccgctgcaagccagaggacacagcctgcatgaccacgctggtgacggtggaggcagagtaccccttcaaccagagccccgtggtgacccgctcctgctccagctcctgtgtggccaccgaccccgacagcatcggggccgcccacctgatcttctgctgcttccgagacctctgcaactcggaactc

SEQ ID NO: 4316 - DNA, 1800 bp, Homo Sapiens
atgcacggaatcctgggggcatgtgggcgcctcagacttgagccagcaacacccttgacaccccttctctgtgcagagagggatgagtgccgagctcacccgtgcagaaatggagggtcctgcaggaacctcccaggggcctatgtctgccggtgccctgcaggcttcgttggagtccactgtgagacagaggtggacgcctgcgactccagcccctgccagcatggaggccggtgtgagagcggcggtggggcctacctgtgcgtctgcccagagagcttcttcggctaccactgcgagacagtgagtgacccctgcttctccagcccctgtgggggccgtggctattgcctggccagcaacggctcccacagctgcacctgcaaagtgggctacacgggcgaggactgcgccaaagagctcttcccaccgacggccctcaagatggagagagtggaggagagtggggtctctatctcctggaacccgcccaatggtccagccgccaggcagatgcttgatggctacgcggtcacctacgtctcctccgacggctcctaccgccgcacggactttgtggacaggacccgctcctcgcaccagctccaggccctggcggccggcagggcctacaacatctccgtcttctcagtgaagcgaaacagtaacaacaagaatgacatcagcaggcctgccgtgctgctggcccgcacgcgaccccgccctgtggaaggcttcgaggtcaccaatgtgacggctagcaccatctcagtgcagtgggccctgcacaggatccgccatgccaccgtcagtggggtccgtgtgtccatccgccaccctgaggccctcagggaccaggccaccgatgtggacaggagtgtggacaggttcacctttagggccctgctgcctgggaagaggtacaccatccagctgaccaccctcagtgggctcaggggagaggagcaccccacagagagcctggccaccgcgccgacgcacgtgtggacccggcccctgcctccagcaaacctgaccgccgcccgagtcactgccacctctgcccacgtggtctgggatgccccgactccaggcagcttgctggaggcttatgtcatcaatgtgaccaccagccagagcaccaagagccgctatgtccccaacgggaagctggcgtcctacacggtgcgcgacctgctgccgggacggcggtaccagctctctgtgatagcagtgcagagcacggagctcgggccgcagcacagcgagcccgcccacctctacatcatcacctcccccagggatggcgctgacagacgctggcaccagggaggacaccaccctcgggtgctcaagaacagaccgcccccggcgcgcctgccggagctgcgcctgctcaatgaccacagcgcccccgagacccccacccagccccccaggttctcggagcttgtggacggcagaggaagagtgagcgccaggttcggtggctcacccagcaaagcagccaccgtgagatcacacgtccctggcaactgttcagaaaacccctgtcagaacggaggcacttgtgtgccgggcgcagacgcccacagctgtgactgcgggccagggttcaaaggcagacgctgcgagctcgcctgtataaaggtgtcccgcccctgcacaaggctgttctccgagacaaagtcctttccagtctgggagggaggcgtctgtcaccacgtgtataaaagagtctaccgagttcaccaagacatctgcttcaaagagagctgtgaaagcacaagcctcaaacta

SEQ ID NO: 4317 - DNA, 234 bp, Homo Sapiens
gtcaaggactgcgtcttctgtgagctcaccgactccatgcagtgtcctggtacctacatgcactgtggcgatgacgaggactgcttcacaggccacggggtcgccccgggcactggtccggtcatcaacaaaggctgcctgcgagccaccagctgcggccttgaggaacccgtcagctacaggggcgtcacctacagcctcaccaccaactgctgcaccggccgcctgtgtaac

SEQ ID NO: 4318 - DNA, 555 bp, Homo Sapiens
tgtctcctctgcttcacaacctactctgagcgcctccgcatctgccagatgtttgttgggatgcggagccccaagcttgaagagtgtgaggaggccttcacggccgccttccagggcctctctgacaccgaaatcagtgaggagaccatccacacttcatcagtgtcctggggaaggtgcagagggagggcaggagaggcccagagggtcaggctgagggacagacagagagaaacagtcagaggagaaaggctcaaagaccatgagaacaacagagacttagggacagagagacacagacaggggaagacagcagggcaaagactcagagaggggaggatggagagtcagagaggggaagatggagactcagagagggggaggatggagactcagagagagaggaagatggagactcggaaagatggagactcaggagtatggagagtcagagaggggaggatggacactcgggaggatggagagtcaggaggatggagactcatagaaaggggaggatggagagtcaggagaggttggagactggagagggaa

SEQ ID NO: 4319 - DNA, 1434 bp, Homo Sapiens
gggccaccgcccgcgccccctgggctgcccgcgggagccgactgcctgaacagctttaccgccggggtgcctggcttcgtgctggacaccaacgcctcggtcagcaacggagctaccttcctggagtcccccaccgtgcgccggggctgggactgcgtgcgcgcctgctgcaccacccagaactgcaacttggcgctagtggagctgcagcccgaccgcggggaggacgccatcgccgcctgcttcctcatcaactgcctctacgagcagaacttcgtgtgcaagttcgcgcccagggagggcttcatcaactacctcacgagggaagtgtaccgctcctaccgccagctgcggacccagggctttggagggtctgggatccccaaggcctgggcaggcatagacttgaaggtacaaccccaggaacccctggtgctgaaggatgtggaaaacacagattggcgcctactgcggggtgacacggatgtcagggtagagaggaaagacccaaaccaggtggaactgtggggactcaaggaaggcacctacctgttccagctgacagtgactagctcagaccacccagaggacacggccaacgtcacagtcactgtgctgtccaccaagcagacagaagactactgcctcgcatccaacaaggtgggtcgctgccggggctctttcccacgctggtactatgaccccacggagcagatctgcaagagtttcgtttatggaggctgcttgggcaacaagaacaactaccttcgggaagaagagtgcattctagcctgtcggggtgtgcaaggcccctccatggaaaggcgccatccagtgtgctctggcacctgtcagcccacccagttccgctgcagcaatggctgctgcatcgacagtttcctggagtgtgacgacacccccaactgccccgacgcctccgacgaggctgcctgtgaaaaatacacgagtggctttgacgagctccagcgcatccatttccccagtgacaaagggcactgcgtggacctgccagacacaggactctgcaaggagagcatcccgcgctggtactacaaccccttcagcgaacactgcgcccgctttacctatggtggttgttatggcaacaagaacaactttgaggaagagcagcagtgcctcgagtcttgtcgcggcatctccaagaaggatgtgtttggcctgaggcgggaaatccccattcccagcacaggctctgtggagatggctgtcgcagtgttcctggtcatctgcattgtggtggtggtagccatcttgggttactgcttcttcaagaaccagagaaaggacttccacggacaccaccaccacccaccacccacccctgccagctccactgtctccactaccgaggacacggagcacctggtctataaccacaccacccggcccctc

SEQ ID NO: 4320 - DNA, 1302 bp, Homo Sapiens
ttcccaggatcgggagactcaccactagaagacgatgaagtcgggtattcacaccctagatataaagataccccgtggtgctcccccatcaaggtgaagtatggggatgtgtactgcagggcccctcaaggaggatactacaaaacagccctgggaaccaggtgcgacattcgctgccagaagggctacgagctgcatggctcttccctactgatctgccagtcaaacaaacgatggtctgacaaggtcatctgcaaacaaaagcgatgtcctacccttgccatgccagcaaatggagggtttaagtgtgtagatggtgcctactttaactcccggtgtgagtattattgttcaccaggatacacgttgaaaggggagcggaccgtcacatgtatggacaacaaggcctggagcggccggccagcctcctgtgtggatatggaacctcctagaatcaagtgcccaagtgtgaaggaacgcattgcagaacccaacaaactgacagtccgggtgtcctgggagacacccgaaggaagagacacagcagatggaattcttactgatgtcattctaaaaggcctccccccaggctccaactttccagaaggagaccacaagatccagtacacagtctatgacagagctgagaataagggcacttgcaaatttcgagttaaagtaagagtcaaacgctgtggcaaactcaatgccccagagaatggttacatgaagtgctccagcgacggtgataattatggagccacctgtgagttctcctgcatcggcggctatgagctccagggtagccctgcccgagtatgtcaatccaacctggcttggtctggcacggagcccacctgtgcagccatgaacgtcaatgtgggtgtcagaacggcagctgcacttctggatcagttttatgagaaaaggagactcctcattgtgtccacacccacagcccgaaacctcctttaccggctccagctaggaatgctgcagcaagcacagtgtggccttgatcttcgacacatcaccgtggtggagctggtgggtgtgttcccgactctcattggcaggataggagcaaagattatgcctccagccctagcgctgcagctcaggctgttgctgcgaatcccactctactccttcagtatggtgctagtggataagcatggcatggacaaagagcgctatgtctccctggtgatgcctgtggccctgttcaacctgattgacacttttcccttgagaaaagaagagatggtcctacaagccgaaatgagccagacctgtaacacc

SEQ ID NO: 4321 - DNA, 1326 bp, Homo Sapiens
acttggtatgcaggctctgggtactacccggacgagtcttacaatgaagtttacgccgaagaggtgccccaagctcccgcactggattacagagttccccgttggtgttatacgctgaacatccaagatggagaggccacatgctactctcccaagggtggcaattatcattcatctttggggactaggtgcgagctgagctgtgatagaggttttcgtcttataggaaggagatcagtacaatgtctgccatctaggagatggtccggtactgcctactgcagacagatgaggtgccacgccttgcctttcatcacaagcggaacttacacgtgcactaatggggtcttgctagactcacgttgcgactattcttgttccagcggctaccacttggaaggcgatagaagcaggatttgcatggaggacggcagatggagtggaggggagcccgtttgcgtagatatagacccacccaaaatcagatgccctcatagtagggagaaaatggcagagcctgaaaagctgacggcgcgtgtttactgggatccgccactagtaaaggattccgccgacgggaccataacaagagtaacacttaggggtccagagcctgggagtcatttcccagagggcgaacatgtaatcagatacacagcgtatgacagagcgtataaccgtgcgagttgtaagtttatagtcaaagtacaggttcgtagatgcccaactctaaagccgcctcaacacggctatcttacatgcacatctgctggagacaattacggggcgacatgtgaataccactgcgatggggggtacgatagacaaggaaccccgtccagagtatgccagagctctagacagtggtccggaagtcccccaatttgcgcaccgatgaagatcaacgtcaacgtgaacagtgcagccggacttcttgatcaattttatgaaaagcaaagattgttgatcataagcgcacctgacccgtcaaacaggtattataaaatgcaaatttctatgctacagcaatccacctgcggtctagatcttaggcatgtcactataatcgagctggtgggacaaccgcctcaagaggtcggaagaatcagggaacaacagttgagtgcaaacataatcgaagaactgaggcaattccaaagattaaccaggtcttattttaacatggtcttaattgacaaacaagggatcgacagagacaggtatatggaaccagttactccggaagaaatatttacattcattgacgactatttattaagcaatcaggaactgacgcagaggcgtgaacaaagagacatttgtgag

SEQ ID NO: 4322 - DNA, 570 bp, Homo Sapiens
atgactgggactttgcggacgcgcgcgtggcctgccgcgaagcgggctgcgggcctgcgctgggcgctacgggacgaggctcgcctgagcgactgcttccacctgggctggggccagcacaactgcggccaccacgaggacgcgggagcgctctgcgcaggtgaggctgacagcgaaggcccagaggagctgggactgcaagtccagcaggatggttctgagaccacgcgggtgcccactcctcggcccagggacgggcatctacgtctggtcaatggagcccaccgatgcgagggacgtgtagagctctacctagggcaacggtggggcactgtctgtgatgatgcttgggacctgcgggcagccggtgtcctgtgccgccagctgggctgtggccaggccctcgcagcccctggcgaggctcactttggcccaggccgaggccccattctcctggacaatgtcaagtgccgtggggaagaaagtgctctgctgctctgctctcatatccgctgggatgcccacaactgtgaccacagcgaggatgccagtgtcctgtgccagccttca

SEQ ID NO: 4323 - DNA, 573 bp, Homo Sapiens
ctcagccatagtcacagtgagaaggcgacaggaaccagctcgggggccaactctgaggagtccactgcagcagagttttgccgaattgacaagcccctgtgtcacagtgaggatgagaaactcagcttcgaggcagtccgtaacatccacaaactgatggacgatgatgccaatggtgatgtggatgtggaagaaagtgatgagttcctgagggaagacctcaattaccatgacccaacagtgaaacacagcaccttccatggtgaggataagctcatcagcgtggaggacctgtggaaggcatggaagtcatcagaagtatacaattggaccgtggatgaggtggtacagtggctgatcacatatgtggagctgcctcagtatgaggagaccttccggaagctgcagctcagtggccatgccatgccaaggctggctgtcaccaacaccaccatgacagggactgtgctgaagatgacagaccggagtcatcggcagaagctgcagctgaaggctctggatacagtgctctttgggcctcctctcttgactcgccataatcacctcaaggac

SEQ ID NO: 4324 - DNA, 612 bp, Homo Sapiens
tgcgagcttgtgccccggcacctccgcgggcggcgggcgactggctctgccgcaactgccgcctcctctcccgccgcggcggccggcgatagcccggcgctcatgacagatccctgcatgtcactgagtccaccatgctttacagaagaagacagatttagtctggaagctcttcaaacaatacataaacaaatggatgatgacaaagatggtggaattgaagtagaggaaagtgatgaattcatcagagaagatatgaaatataaagatgctactaataaacacagccatctgcacagagaagataaacatataacgattgaggatttatggaaacgatggaaaacatcagaagttcataattggacccttgaagacactcttcagtggttgatagagtttgttgaactaccccaatatgagaagaattttagagacaacaatgtcaaaggaacgacacttcccaggatagcagtgcacgaaccttcatttatgatctcccagttgaaaatcagtgaccggagtcacagacaaaaacttcagctcaaggcattggatgtggttttgtttggacctctaacacgcccacctcataactggatgaaagatttt

SEQ ID NO: 4325 - DNA, 2184 bp, Homo Sapiens
gcgccgggccccgacggtttagacgtctgtgccacttgccatgaacatgccacatgccagcaaagagaagggaagaagatctgtatttgcaactatggatttgtagggaacgggaggactcagtgtgttgataaaaatgagtgccagtttggagccactcttgtctgtgggaaccacacatcttgccacaacacccccgggggcttctattgcatttgcctggaaggatatcgagccacaaacaacaacaagacattcattcccaacgatggcaccttttgtacagacatagatgagtgtgaagtttctggcctgtgcaggcatggagggcgatgcgtgaacactcatgggagctttgaatgctactgtatggatggatacttgccaaggaatggacctgaacctttccacccgaccaccgatgccacatcatgcacagaaatagactgtggtacccctcctgaggttccagatggctatatcataggaaattatacgtctagtctgggcagccaggttcgttatgcttgcagagaaggattcttcagtgttccagaagatacagtttcaagctgcacaggcctgggcacatgggagtccccaaaattacattgccaagagatcaactgtggcaaccctccagaaatgcggcacgccatcttggtaggaaatcacagctccaggctgggcggtgtggctcgctatgtctgtcaagagggctttgagagccctggaggaaagatcacttctgtttgcacagagaaaggcacctggcgagaaagtactttaacatgcacagaaattctgacaaagattaatgatgtatcactgtttaatgatacctgtgtgagatggcaaataaactcaagaagaataaaccccaagatctcatatgtgatatccataaaaggacaacggttggaccctatggaatcagttcgtgaggagacagtcaacttgaccacagacagcaggaccccagaagtgtgcctagccctgtacccaggcaccaactacaccgtgaacatctccacagcacctcccaggcgctcgatgccagccgtcatcggtttccagacagctgaagttgatctcttagaagatgatggaagtttcaatatttcaatatttaatgaaacttgtttgaaattgaacaggcgttctaggaaagttggatcagaacacatgtaccaatttaccgttctgggtcagaggtggtatctggctaacttttctcatgcaacatcgtttaacttcacaacgagggaacaagtgcctgtagtgtgtttggatctgtaccctacgactgattatacggtgaatgtgaccctgctgagatctcctaagcggcactcagtgcaaataacaatagcaactcccccagcagtaaaacagaccatcagtaacatttcaggatttaatgaaacctgcttgagatggagaagcatcaagacagctgatatggaggagatgtatttattccaaatttggggccagagatggtatcagaaggaatttgcccaggaaatgacctttaatatcagtagcagcagccgagatcccgaggtgtgcttggacctacgtccgggtaccaactacaatgtcagtctccgggctctgtcttcggaacttcctgtggtcatctccctgacaacccagataacagagcctcccctcccggaagtagaattttttacggtgcacagaggacctctaccacgcctcagactgaggaaagccaaggagaaaaatggaccaatcagttcatatcaggtgttagtgcttcccctggccctccaaagcacattttcttgtgattctgaaggcgcttcctccttctttagcaacgcctctgatgctgatggatacgtggctgcagaactactggccaaagatgttccagatgatgccatggagatacctataggagacaggctgtactatggggaatattataatgcacccttgaaaagagggagtgattactgcattatattacgaatcacaagtgaatggaataaggtgagaagacactcctgtgcagtttgggctcaggtgaaagaaataccttgtaactgtaatttcctgaggctgcatatccacagggccaactcaggggacacacagattcgtcactcatgctgctgcagatggcgggtgttggactgggttccctggctgttg

SEQ ID NO: 4326 - DNA, 2274 bp, Homo Sapiens
caagagagctgctccatgcgctgtggcgccctggacgggccatgttcctgccacccgacgtgctctggccttggcacctgctgcttggatttccgggacttctgcctggagatattgccctactcaggatccatgatgggcggcaaggactttgtggtgcggcacttcaagatgtccagccccacagacgccagtgtgatctgcaggtttaaggacagcatccagaccctcggccatgtggactcctccgggcaagtgcactgtgtgtcacctctgctctatgagagcggccgcatccccttcactgtgtcactggacaacggccactccttccctcgtgcgggcacctggctggctgtgcaccccaacaaagtgtcaatgatggagaagagcgagttggtgaacgagacgcgttggcaatactacggcaccgccaacacctcaggcaacctcagcctgacctggcatgtcaagtcgctgcccacgcagaccatcaccatcgaactgtggggctacgaggagacaggaatgccctactcacaggagtggactgcaaagtggtcgtacctgtaccccctggccacacacatccccaactccggctctttcactttcaccccaaaacctgctcctcccagctaccagagatggcgagtgggtgcacttcggatcatcgacagcaaaaattacgcagggcagaaggacgtgcaggcgctctggaccaacgaccacgcactggcctggcacctgagcgatgacttccgagaggaccctgtggcctgggcacgaactcagtgccaggcctgggaggagctggaggatcagctgcccaacttcctggaggagctgccggactgcccctgcaccctgacccaggcccgggctgactccggccgcttcttcacggactacggctgtgacatggagcagggcagcgtgtgcacctaccaccccggggccgtgcactgtgtgcgttctgtgcaggccagcctccggtacggctcaggtcagcagtgctgctacacagcggacgggacgcagctcctgacagctgactccagcggcggcagcactcccgaccgcggccatgactggggcgcacccccgttccgcacgccaccccgagtgcccagcatgtcccactggctctacgatgtcctcagcttctattactgctgcctctgggcacccgactgcccccgctacatgcaacggcggccctccaatgactgccgcaactaccggcccccaagactggcctccgccttcggagacccacactttgtgaccttcgacggcaccaacttcacattcaatgggcgcggagagtacgtgctgctggaggcagcgctgaccgacctgagggtgcaggcgcgggcccagcccgggacgatgtccaacggcacggagacccgtggcactgggctgaccgcagtggccgtccaggagggcaactcagatgtggtggaagtcaggctggccaacaggaccggaggtctggaggtgctgctgaaccaggaggtgctgagcttcaccgagcagagctggatggacctgaaaggaatgttcctgtcggtggctgccggggacagggtctccatcatgctggcatcaggggccggcctggaggtcagcgtgcagggcccgttcctgagtgtgtccgtcctgctgcctgagaagttcctcacccacacccacggcctcctcgggacactcaacaacgaccccaccgacgacttcaccctgcacagcgggcgcgtcctgcccccaggcaccagtccccaggagctgttcctgtttggggccaactggaccgtgcacaatgcgtcctccctgctcacctacgattcctggttcctggtccacaacttcctgtaccaacccaagcacgaccccaccttcgagcccctcttccccagtgagaccaccctcaaccccagcctggcacaagaggcagccaaactatgtggggacgatcatttctgcaactttgatgtggcagccactgggagcctgagcacgggcactgccactcgggtggcccaccagctgcaccagcgtcgcatgcagagcctgcagccagtggtgtcctgtggctggctggccccacctcccaacggacaaaaggagggcaacaggtacctggcgggttccaccatctacttccactgtgacaacggctacagcctggccggggcagagaccagcacctgccaggctgacggcacctggtcctcacccaccccgaagtgccagccaggacgcagctacgcg

SEQ ID NO: 4327 - DNA, 747 bp, Homo Sapiens
ttcggccctgcacagctcacgggcgggttcgatgaccttcaagtgtgtgctgaccccggcattcccgagaatggcttcaggacccccagcggaggggttttctttgaaggctctgtagcccgatttcactgccaagacggattcaagctgaagggcgctacaaagagactgtgtttgaagcattttaatggaaccctaggctggatcccaagtgataattccatctgtgtgcaagaagattgccgtatccctcaaatcgaagatgctgagattcataacaagacatatagacatggagagaagctaatcatcacttgtcatgaaggattcaagatccggtaccccgacctacacaatatggtttcattatgtcgcgatgatggaacgtggaataatctgcccatctgtcaaggctgcctgagacctctagcctcttctaatggctatgtaaacatctctgagctccagacctccttcccggtggggactgtgatctcctatcgctgctttcccggatttaaacttgatgggtctgcgtatcttgagtgcttacaaaaccttatctggtcgtccagcccaccccggtgccttgctctggaaggaggaagacctgaacatcttttccctgtcctttatttcccacacatcaggttggcagctgctgtgctttatttttgccctgtgttaaagtcctctcccaccccagcacctacctgttcctcaactagcaccaccacatctctgttc

SEQ ID NO: 4328 - DNA, 123 bp, Homo Sapiens
gatggtggagaggaacagacactcagcactgaagcagagacctgggaaggcgctggccccagcattcagctccagctgcaggaggtgaagacgggcaaggcaagccagttctttgggctgatg

SEQ ID NO: 4329 - DNA, 660 bp, Homo Sapiens
caaggagatacaaggggggacggcagtttgcccaaacccagtctttccgcttggcccagtagcgtggtccccgcaaacagtaatgtgaccctgagatgctggacgccagcccgtggagttagtttcgtcttgaggaaaggggggattattctggagagtcctaagcctctggactctaccgaaggggcggcggaatttcacctaaacaacctgaaagtaaggaacgcgggagaatatacatgcgagtactaccgtaaagcctcaccccacattttgagccagagaagcgatgtcctgttgctactagttaccggtcacttatctaaacccttccttaggacctaccaacgtggtactgtgacggcagggggaagggtgacacttcaatgccagaagagggaccagctattcgttcccattatgtttgcgctgcttaaagcaggtactcccagcccaatacagttacagagtcccgctggtaaagagatcgacttctctttagtagacgttaccgccggagacgctggaaactacagttgtatgtattatcagacgaagtcccctttctgggcctctgaacccagtgatcagttagagatattggtgacagttccaccaggcacaacgagctcaaactactctcttggaaatttcgtaagg

SEQ ID NO: 4330 - DNA, 360 bp, Homo Sapiens
ctgggccatcaggaatttgctcgtccatctcggggatacctggccttcagagatgacagcatttggccccaggaggagcctgcaattcggcctcggtcttcccagcgtgtgccgcccatggggatacagcacagtaaggagctaaacagaacctgctgcctgaatgggggaacctgcatgctggggtccttttgtgcctgccctccctccttctacggacggaactgtgagcacgatgtgcgcaaagagaattgtgggtctgtgccccatgacacctggctgcccaagaagtgttccctgtgtaaatgctggcacggtcagctccgctgctttcctcaggcatttctacccggctgtgat

SEQ ID NO: 4331 - DNA, 2175 bp, Homo Sapiens
atggacttgatcttgatcaattccctacctcttgtatctgatgctgaaacatctctcacctgcattgcctctgggtggcgcccccatgagcccatcaccataggaagggactttgaagccttaatgaaccagcaccaggatccgctggaagttactcaagatgtgaccagagaatgggctaaaaaagttgtttggaagagagaaaaggctagtaagatcaatggtgcttatttctgtgaagggcgagttcgaggagaggcaatcaggatacgaaccatgaagatgcgtcaacaagcttccttcctaccagctactttaactatgactgtggacaagggagataacgtgaacatatctttcaaaaaggtattgattaaagaagaagatgcagtgatttacaaaaatggttccttcatccattcagtgccccggcatgaagtacctgatattctagaagtacacctgcctcatgctcagccccaggatgctggagtgtactcggccaggtatataggaggaaacctcttcacctcggccttcaccaggctgatagtccggagatgtgaagcccagaagtggggacctgaatgcaaccatctctgtactgcttgtatgaacaatggtgtctgccatgaagatactggagaatgcatttgccctcctgggtttatgggaaggacgtgtgagaaggcttgtgaactgcacacgtttggcagaacttgtaaagaaaggtgcagtggacaagagggatgcaagtcttatgtgttctgtctccctgacccctatgggtgttcctgtgccacaggctggaagggtctgcagtgcaatgaagcatgccaccctggtttttacgggccagattgtaagcttaggtgcagctgcaacaatggggagatgtgtgatcgcttccaaggatgtctctgctctccaggatggcaggggctccagtgtgagagagaaggcataccgaggatgaccccaaagatagtggatttgccagatcatatagaagtaaacagtggtaaatttaatcccatttgcaaagcttctggctggccgctacctactaatgaagaaatgaccctggtgaagccggatgggacagtgctccatccaaaagactttaaccatacggatcatttctcagtagccatattcaccatccaccggatcctcccccctgactcaggagtttgggtctgcagtgtgaacacagtggctgggatggtggaaaagcccttcaacatttctgttaaagttcttccaaagcccctgaatgccccaaacgtgattgacactggacataactttgctgtcatcaacatcagctctgagccttactttggggatggaccaatcaaatccaagaagcttctatacaaacccgttaatcactatgaggcttggcaacatattcaagtgacaaatgagattgttacactcaactatttggaacctcggacagaatatgaactctgtgtgcaactggtccgtcgtggagagggtggggaagggcatcctggacctgtgagacgcttcacaacagcttctatcggactccctcctccaagaggtctaaatctcctgcctaaaagtcagaccactctaaatttgacctggcaaccaatatttccaagctcggaagatgacttttatgttgaagtggagagaaggtctgtgcaaaaaagtgatcagcagaatattaaagttccaggcaacttgacttcggtgctacttaacaacttacatcccagggagcagtacgtggtccgagctagagtcaacaccaaggcccagggggaatggagtgaagatctcactgcttggacccttagtgacattcttcctcctcaaccagaaaacatcaagatttccaacattacacactcctcggctgtgatttcttggacaatattggatggctattctatttcttctattactatccgttacaaggttcaaggcaagaatgaagaccagcacgttgatgtgaagataaagaatgccaccatcactcagtatcagctcaagggcctagagcctgaaacagcataccaggtggacatttttgcagagaacaacatagggtcaagcaacccagccttttctcatgaactggtgaccctcccagaatctcaagcaccagcggacctcggaggggggaagatgctgctt

SEQ ID NO: 4332 - DNA, 390 bp, Homo Sapiens
attctggagaatggtgtcaatgtcactgtgtcccagatgacttctgtgttgaatgggaggactagacggtttgcagatattcagctccagcatggagccctgtgcttcaacatccggtatgggacaactgtcgaagaggaaaagaatcacgtgttggagattgccagacagcgcgcagtggcccaggcctggactaaggaacaaagaaggctgcaagagggggaagaggggattagggcatggacagaaggggaaaagcagcagcttttgagcactgggcgggtacaaggttacgatgggtattttgttttgtctgttgagcagtatttagaactttctgacagtgccaataatattcactttatgagacagagcgaaataggcaggagg

SEQ ID NO: 4333 - DNA, 591 bp, Homo Sapiens
ctgtattgtcaaaagggtctgtccatgactgtggaagcagatccagccaatatgtttaactggaccacagaggaagtggagacttgtgacaaaggggcactttgccaggaaaccatactaataattaaagcagggactgagacagccattttggccacgaagggctgcatcccggaaggggaggaggccataacaattgtccagcactcttcacctcccggcctgatcgtgacctcctacagtaactactgtgaggattccttctgtaatgacaaagacagcctgtctcagttttgggagttcagtgagaccacagcttccactgtgtcaacaaccctccattgtccaacctgtgtggctttggggacctgtttcagtgctccttctcttccctgtcccaatggtacaactcgatgctatcaaggaaaacttgagatcactggaggtggcattgagtcgtctgtggaggtcaaaggctgtacagccatgattggctgcaggctgatgtctggaatcttagcagtaggacccatgtttgtgagggaagcgtgcccacatcagctgctcactcaacctcgaaagactgaaaat

SEQ ID NO: 4334 - DNA, 2037 bp, Homo Sapiens
gtccctgataaaactgtgagatggtgtgcagtgtcggagcatgaggccactaagtgccagagtttccgcgaccatatgaaaagcgtcattccatccgatggtcccagtgttgcttgtgtgaagaaagcctcctaccttgattgcatcagggccattgcggcaaacgaagcggatgctgtgacactggatgcaggtttggtgtatgatgcttacctggctcccaataacctgaagcctgtggtggcagagttctatgggtcaaaagaggatccacagactttctattatgctgttgctgtggtgaagaaggatagtggcttccagatgaaccagcttcgaggcaagaagtcctgccacacgggtctaggcaggtccgctgggtggaacatccccataggcttactttactgtgacttacctgagccacgtaaacctcttgagaaagcagtggccaatttcttctcgggcagctgtgccccttgtgcggatgggacggacttcccccagctgtgtcaactgtgtccagggtgtggctgctccacccttaaccaatacttcggctactcaggagccttcaagtgtctgaagaatggtgctggggatgtggcctttgtcaagcactcgactatatttgagaacttggcaaacaaggctgacagggaccagtatgagctgctttgcctggacaacacccggaagccggtagatgaatacaaggactgccacttggcccaggtcccttctcataccgtcgtggcccgaagtatgggcggcaaggaggacttgatctgggagcttctcaaccaggcccaggaacattttggcaaagacaaatcaaaagaattccaactattcagctctcctcatgggaaggacctgctgtttaaggactctgcccacgggtttttaaaagtcccccccaggatggatgccaagatgtacctgggctatgagtatgtcactgccatccggaatctacgggaaggcacatgccaagaagccccaacagatgaatgcaagcctgtgaagtggtgtgcgctgagccaccacgagaggctcaagtgtgatgagtggagtgttaacagtgtagggaaaatagagtgtgtatcagcagagaccaccgaagactgcatcgccaagatcatgaatggagaagctgatgccatgagcttggatggagggtttgtctacatagcgggcaagtgtggtctggtgcctgtcttggcagaaaactacaataagagcgataattgtgaggatacaccagaggcagggtattttgctgtagcagtggtgaagaaatcagcttctgacctcacctgggacaatctgaaaggcaagaagtcctgccatacggcagttggcagaaccgctggctggaacatccccatgggcctgctctacaataagatcaaccactgcagatttgatgaatttttcagtgaaggttgtgcccctgggtctaagaaagactccagtctctgtaagctgtgtatgggctcaggcctaaacctgtgtgaacccaacaacaaagagggatactacggctacacaggcgctttcaggtgtctggttgagaagggagatgtggcctttgtgaaacaccagactgtcccacagaacactgggggaaaaaaccctgatccatgggctaagaatctgaatgaaaaagactatgagttgctgtgccttgatggtaccaggaaacctgtggaggagtatgcgaactgccacctggccagagccccgaatcacgctgtggtcacacggaaagataaggaagcttgcgtccacaagatattacgtcaacagcagcacctatttggaagcaacgtaactgactgctcgggcaacttttgtttgttccggtcggaaaccaaggaccttctgttcagagatgacacagtatgtttggccaaacttcatgacagaaacacatatgaaaaatacttaggagaagaatatgtcaaggctgttggtaacctgagaaaatgctccacctcatcactcctggaagcctgcactttccgtagacct

SEQ ID NO: 4335 - DNA, 2091 bp, Homo Sapiens
cgagggtcctgccaggcgtgcggagactctgtgttggtggtcagtgaggatgtcaactatgagcctgacctggatttccaccagggcagactctactggagcgacctccaggccatgttcctgcagttcctgggggaggggcgcctggaggacaccatcaggcaaaccagccttcgggaacgggtggcaggctcggccgggatggccgctctgactcaggacattcgcgcggcgctctcccgccagaagctggaccacgtgtggaccgacacgcactacgtggggctgcaattcccggatccggctcaccccaacaccctgcactgggtcgatgaggccgggaaggtcggagagcagctgccgctggaggaccctgacgtctactgcccctacagcgccatcggcaacgtcacgggagagctggtgtacgcccactacgggcggcccgaagacctgcaggacctgcgggccaggggcgtggatccagtgggccgcctgctgctggtgcgcgtgggggtgatcagcttcgcccagaaggtgaccaatgctcaggacttcggggctcaaggagtgctcatatacccagagccagcggacttctcccaggacccacccaagccaagcctgtccagccagcaggcagtgtatggacatgtgcacctgggaactggagacccctacacacctggcttcccttccttcaatcaaacccagttccctccagttgcatcatcaggccttcccagcatcccagcccagcccatcagtgcagacattgcctcccgcctgctgaggaagctcaaaggccctgtggccccccaagaatggcaggggagcctcctaggctccccttatcacctgggccccgggccacgacttcggctagtggtcaacaatcacaggacctccacccccatcaacaacatcttcggctgcatcgaaggccgctcagagccagatcactacgttgtcatcggggcccagagggatgcatggggcccaggagcagctaaatccgctgtggggacggctatactcctggagctggtgcggaccttttcctccatggtgagcaacggcttccggccccgcagaagtctcctcttcatcagctgggacggtggtgactttggaagcgtgggctccacggagtggctagagggctacctcagcgtgctgcacctcaaagccgtagtgtacgtgagcctggacaacgcagtgctgggggatgacaagtttcatgccaagaccagcccccttctgacaagtctcattgagagtgtcctgaagcaggtggattctcccaaccacagtgggcagactctctatgaacaggtggtgttcaccaatcccagctgggatgctgaggtgatccggcccctacccatggacagcagtgcctattccttcacggcctttgtgggagtccctgccgtcgagttctcctttatggaggacgaccaggcctacccattcctgcacacaaaggaggacacttatgagaacctgcataaggtgctgcaaggccgcctgcccgccgtggcccaggccgtggcccagctcgcagggcagctcctcatccggctcagccacgatcgcctgctgcccctcgacttcggccgctacggggacgtcgtcctcaggcacatcgggaacctcaacgagttctctggggacctcaaggcccgcgggctgaccctgcagtgggtgtactcggcgcggggggactacatccgggcggcggaaaagctgcggcaggagatctacagctcggaggagagagacgagcgactgacacgcatgtacaacgtgcgcataatgcgggtggagttctacttcctttcccagtacgtgtcgccagccgactccccgttccgccacatcttcatgggccgtggagaccacacgctgggcgccctgctggaccacctgcggctgctgcgctccaacagctccgggacccccggggccacctcctccactggcttccaggagagccgtttccggcgtcagctagccctgctcacctggacgctgcaaggggcagccaatgcgcttagcggggatgtctggaacattgataacaacttc

SEQ ID NO: 4336 - DNA, 2016 bp, Homo Sapiens
tgtaaaggggtagaaccaaaaactgagtgtgagagactggcaggaaccgagtctccagtgagggaggagccaggagaggacttccctgcagcacgtcgcttatattgggatgacctgaagagaaagttgtcggagaaactggacagcacagacttcaccggcaccatcaagctgctgaatgaaaattcatatgtccctcgtgaggctggatctcaaaaagatgaaaatcttgcgttgtatgttgaaaatcaatttcgtgaatttaaactcagcaaagtctggcgtgatcaacattttgttaagattcaggtcaaagacagcgctcaaaactcggtgatcatagttgataagaacggtagacttgtttacctggtggagaatcctgggggttatgtggcgtatagtaaggctgcaacagttactggtaaactggtccatgctaattttggtactaaaaaagattttgaggatttatacactcctgtgaatggatctatagtgattgtcagagcagggaaaatcacctttgcagaaaaggttgcaaatgctgaaagcttaaatgcaattggtgtgttgatatacatggaccagactaaatttcccattgttaacgcagaactttcattctttggacatgctcatctggggacaggtgacccttacacacctggattcccttccttcaatcacactcagtttccaccatctcggtcatcaggattgcctaatatacctgtccagacaatctccagagctgctgcagaaaagctgtttgggaatatggaaggagactgtccctctgactggaaaacagactctacatgtaggatggtaacctcagaaagcaagaatgtgaagctcactgtgagcaatgtgctgaaagagataaaaattcttaacatctttggagttattaaaggctttgtagaaccagatcactatgttgtagttggggcccagagagatgcatggggccctggagctgcaaaatccggtgtaggcacagctctcctattgaaacttgcccagatgttctcagatatggtcttaaaagatgggtttcagcccagcagaagcattatctttgccagttggagtgctggagactttggatcggttggtgccactgaatggctagagggatacctttcgtccctgcatttaaaggctttcacttatattaatctggataaagcggttcttggtaccagcaacttcaaggtttctgccagcccactgttgtatacgcttattgagaaaacaatgcaaaatgtgaagcatccggttactgggcaatttctatatcaggacagcaactgggccagcaaagttgagaaactcactttagacaatgctgctttccctttccttgcatattctggaatcccagcagtttctttctgtttttgcgaggacacagattatccttatttgggtaccaccatggacacctataaggaactgattgagaggattcctgagttgaacaaagtggcacgagcagctgcagaggtcgctggtcagttcgtgattaaactaacccatgatgttgaattgaacctggactatgagaggtacaacagccaactgctttcatttgtgagggatctgaaccaatacagagcagacataaaggaaatgggcctgagtttacagtggctgtattctgctcgtggagacttcttccgtgctacttccagactaacaacagatttcgggaatgctgagaaaacagacagatttgtcatgaagaaactcaatgatcgtgtcatgagagtggagtatcacttcctctctccctacgtatctccaaaagagtctcctttccgacatgtcttctggggctccggctctcacacgctgccagctttactggagaacttgaaactgcgtaaacaaaataacggtgcttttaatgaaacgctgttcagaaaccagttggctctagctacttggactattcagggagctgcaaatgccctctctggtgacgtttgggacattgacaatgagttt

SEQ ID NO: 4337 - DNA, 150 bp, Homo Sapiens
gtggtgtcccattttaatgactgcccagattcccacactcagttctgcttccatggaacctgcaggtttttggtgcaggaggacaagccagcatgtgtctgccattctgggtacgttggtgcacgctgtgagcatgcggacctcctggcc

SEQ ID NO: 4338 - DNA, 336 bp, Homo Sapiens
gccctggacaccaactattgcttcagctccacggagaagaactgctgcgtgcggcagctgtacattgacttccgcaaggacctcggctggaagtggatccacgagcccaagggctaccatgccaacttctgcctcgggccctgcccctacatttggagcctggacacgcagtacagcaaggtcctggccctgtacaaccagcataacccgggcgcctcggcggcgccgtgctgcgtgccgcaggcgctggagccgctgcccatcgtgtactacgtgggccgcaagcccaaggtggagcagctgtccaacatgatcgtgcgctcctgcaagtgcagc

SEQ ID NO: 4339 - DNA, 336 bp, Homo Sapiens
gctttggatgcggcctattgctttagaaatgtgcaggataattgctgcctacgtccactttacattgatttcaagagggatctagggtggaaatggatacacgaacccaaagggtacaatgccaacttctgtgctggagcatgcccgtatttatggagttcagacactcagcacagcagggtcctgagcttatataataccataaatccagaagcatctgcttctccttgctgcgtgtcccaagatttagaacctctaaccattctctactacattggcaaaacacccaagattgaacagctttctaatatgattgtaaagtcttgcaaatgcagc

SEQ ID NO: 4340 - DNA, 831 bp, Homo Sapiens
ctgtccacttgcaccaccttggacttcggccacatcaagaagaagagggtggaagccattaggggacagatcttgagcaagctcaggctcaccagcccccctgagccaacggtgatgacccacgtcccctatcaggtcctggccctttacaacagcacccgggagctgctggaggagatgcatggggagagggaggaaggctgcacccaggaaaacaccgagtcggaatactatgccaaagaaatccataaattcgacatgatccaggggctggcggagcacaacgaactggctgtctgccctaaaggaattacctccaaggttttccgcttcaatgtgtcctcagtggagaaaaatagaaccaacctattccgagcagaattccgggtcttgcgggtgcccaaccccagctctaagcggaatgagcagaggatcgagctcttccagatccttcggccagatgagcacattgccaaacagcgctatatcggtggcaagaatctgcccacacggggcactgccgagtggctgtcctttgatgtcactgacactgtgcgtgagtggctgttgagaagagagtccaacttaggtctagaaatcagcattcactgtccatgtcacacctttcagcccaatggagatatcctggaaaacattcacgaggtgatggaaatcaaattcaaaggcgtggacaatgaggatgaccatggccgtggagatctggggcgcctcaagaagcagaaggatcaccacaaccctcatctaatcctcatgatgattcccccacaccggctcgacaacccgggccaggggggtcagaggaagaagcgg

SEQ ID NO: 4341 - DNA, 1980 bp, Homo Sapiens
ggtcccgccaagtcgccctaccagctggtgctgcagcacagcaggctccggggccgccagcacggccccaacgtgtgtgctgtgcagaaggttattggcactaataggaagtacttcaccaactgcaagcagtggtaccaaaggaaaatctgtggcaaatcaacagtcatcagctacgagtgctgtcctggatatgaaaaggtccctggggagaagggctgtccagcagccctaccactctcaaacctttacgagaccctgggagtcgttggatccaccaccactcagctgtacacggaccgcacggagaagctgaggcctgagatggaggggcccggcagcttcaccatcttcgcccctagcaacgaggcctgggcctccttgccagctgaagtgctggactccctggtcagcaatgtcaacattgagctgctcaatgccctccgctaccatatggtgggcaggcgagtcctgactgatgagctgaaacacggcatgaccctcacctctatgtaccagaattccaacatccagatccaccactatcctaatgggattgtaactgtgaactgtgcccggctgctgaaagccgaccaccatgcaaccaacggggtggtgcacctcatcgataaggtcatctccaccatcaccaacaacatccagcagatcattgagatcgaggacacctttgagacccttcgggctgctgtggctgcatcagggctcaacacgatgcttgaaggtaacggccagtacacgcttttggccccgaccaatgaggccttcgagaagatccctagtgagactttgaaccgtatcctgggcgacccagaagccctgagagacctgctgaacaaccacatcttgaagtcagctatgtgtgctgaagccatcgttgcggggctgtctgtggagaccctggagggcacgacactggaggtgggctgcagcggggacatgctcactatcaacgggaaggcgatcatctccaataaagacatcctagccaccaacggggtgatccactacattgatgagctactcatcccagactcagccaagacactatttgaattggctgcagagtctgatgtgtccacagccattgaccttttcagacaagccggcctcggcaatcatctctctggaagtgagcggttgaccctcctggctcccctgaattctgtattcaaagatggaacccctccaattgatgcccatacaaggaatttgcttcggaaccacataattaaagaccagctggcctctaagtatctgtaccatggacagaccctggaaactctgggcggcaaaaaactgagagtttttgtttatcgtaatagcctttgcattgagaacagctgcatcgcggcccacgacaagagggggaggtacgggaccctgttcacgatggaccgggtgctgacccccccaatggggactgtcatggatgtcctgaagggagacaatcgctttagcatgctggtagctgccatccagtctgcaggactgacggagaccctcaaccgggaaggagtctacacagtcttcgctcccacaaatgaagccttccgagccctgccaccaagagaacggagcagactcttgggagatgccaaggaacttgccaacatcctgaaataccacattggtgatgaaatcctggttagcggaggcatcggggccctggtgcggctaaagtctctccaaggtgacaagctggaagtcagcttgaaaaacaatgtggtgagtgtcaacaaggagcctgttgccgagcctgacatcatggccacaaatggcgtggtccatgtcatcaccaatgttctgcagcctccagccaacagacctcaggaaagaggggatgaacttgcagactctgcgcttgagatcttcaaacaagcatcagcgttttccagggcttcccagaggtctgtgcgactagcccctgtctatcaaaagttattagagaggatgaagcat

SEQ ID NO: 4342 - DNA, 279 bp, Homo Sapiens
ctacaatgcttctgccacttatgtaccaaagacaacttcacatgcgttacggatggactgtgttttgtttcagtcactgagaccaccgacaaagttatccataattcaatgtgtatcgcggagattgacctaatccccagggacagaccgtttgtctgtgcgccttcttcaaaaaccggctctgtaacaactacctactgctgcaatcaagaccattgtaataaaatcgagcttcccaccacggttaagagctcaccggggctggggccagtggaactg

SEQ ID NO: 4343 - DNA, 507 bp, Homo Sapiens
acgatcccaccgcacgttcagaagtcggatgtggaaatggaggcccagaaagatgaaatcatctgccccagctgtaataggactgcccatccactgagacatattaataacgacatgatagtcactgacaacaacggtgcagtcaagtttccacaactgtgtaaattttgtgatgtgagattttccacctgtgacaaccagaaatcctgcatgagcaactgcagcatcacctccatctgtgagaagccacaggaagtctgtgtggctgtatggagaaagaatgacgagaacataacactagagacagtttgccatgaccccaagctcccctaccatgactttattctggaagatgctgcttctccaaagtgcattatgaaggaaaaaaaaaagcctggtgagactttcttcatgtgttcctgtagctctgatgagtgcaatgacaacatcatcttctcagaagaatataacaccagcaatcctgacttgttgctagtcatatttcaa

SEQ ID NO: 4344 - DNA, 2301 bp, Homo Sapiens
ggtccagagcctggtgcactgtgtgaactgtcacctgtcagtgcctcccatcctgtccaggccttgatggagagcttcactgttttgtcaggctgtgccagcagaggcacaactgggctgccacaggaggtgcatgtcctgaatctccgcactgcgggccaggggcctggccagctacagagagaggtcacacttcacctgaatcccatctcctcagtccacatccaccacaagtctgttgtgttcctgctcaactccccacaccccctggtgtggcatctgaagacagagagacttgccactggggtctccagactgtttttggtgtctgagggttctgtggtccagttttcatcagcaaacttctccttgacagcagaaacagaagaaaggaacttcccccatggaaatgaacatctgttaaattgggcccgaaaagagtatggagcagttacttcattcaccgaactcaagatagcaagaaacatttatattaaagtgggggaagatcaagtgttccctccaaagtgcaacatagggaagaattttctctcactcaattaccttgctgagtaccttcaacccaaagcagcagaagggtgtgtgatgtccagccagccccagaatgaggaagtacacatcatcgagctaatcacccccaactctaacccctacagtgctttccaggtggatataacaattgatataagaccttctcaagaggatcttgaagtggtcaaaaatctcatcctgatcttgaagtgcaaaaagtctgtcaactgggtgatcaaatcttttgatgttaagggaagcctgaaaattattgctcctaacagtattggctttggaaaagagagtgaaagatctatgacaatgaccaaatcaataagagatgacattccttcaacccaagggaatctggtgaagtgggctttggacaatggctatagtccaataacttcatacacaatggctcctgtggctaatagatttcatcttcggcttgaaaataatgcagaggagatgggagatgaggaagtccacactattcctcctgagctacggatcctgctggaccctggtgccctgcctgccctgcagaacccgcccatccggggaggggaaggccaaaatggaggccttccgtttcctttcccagatatttccaggagagtctggaatgaagagggagaagatgggctccctcggccaaaggaccctgtcattcccagcatacaactgtttcctggtctcagagagccagaagaggtgcaagggagcgtggatattgccctgtctgtcaaatgtgacaatgagaagatgatcgtggctgtagaaaaagattcttttcaggccagtggctactcggggatggacgtcaccctgttggatcctacctgcaaggccaagatgaatggcacacactttgttttggagtctcctctgaatggctgcggtactcggccccggtggtcagcccttgatggtgtggtctactataactccattgtgatacaggttccagcccttggggacagtagtggttggccagatggttatgaagatctggagtcaggtgataatggatttccgggagatatggatgaaggagatgcttccctgttcacccgacctgaaatcgtggtgtttaattgcagccttcagcaggtgaggaaccccagcagcttccaggaacagccccacggaaacatcaccttcaacatggagctatacaacactgacctctttttggtgccctcccagggcgtcttctctgtgccagagaatggacacgtttatgttgaggtatctgttactaaggctgaacaagaactgggatttgccatccaaacgtgctttatctctccatattcgaaccctgataggatgtctcattacaccattattgagaatatttgtcctaaagatgaatctgtgaaattctacagtcccaagagagtgcactttcctatcccgcaagctgacatggataagaagcgattcagctttgtcttcaagcctgtcttcaacacctcactgctctttctacagtgtgagctgacgctgtgtacgaagatggagaagcacccccagaagttgcctaagtgtgtgcctcctgacgaagcctgcacctcgctggacgcctcgataatctgggccatgatgcagaataagaagacgttcaccaagccccttgctgtgatccaccatgaagcagaatctaaagaaaaaggtccaagcatgaaggaaccaaatccaatttctccaccaattttccatggtctggacaccctaaccgtg

SEQ ID NO: 4345 - DNA, 1491 bp, Homo Sapiens
gcacccgcagagccgcagccgggtggcagccagtgcgtcgagcacgactgcttcgcgctctacccgggccccgcgaccttcctcaatgccagtcagatctgcgacggactgcggggccacctaatgacagtgcgctcctcggtggctgccgatgtcatttccttgctactgaacggcgacggcggcgttggccgccggcgcctctggatcggcctgcagctgccacccggctgcggcgaccccaagcgcctcgggcccctgcgcggcttccagtgggttacgggagacaacaacaccagctatagcaggtgggcacggctcgacctcaatggggctcccctctgcggcccgttgtgcgtcgctgtctccgctgctgaggccactgtgcccagcgagccgatctgggaggagcagcagtgcgaagtgaaggccgatggcttcctctgcgagttccacttcccagccacctgcaggccactggctgtggagcccggcgccgcggctgccgccgtctcgatcacctacggcaccccgttcgcggcccgcggagcggacttccaggcgctgccggtgggcagctccgccgcggtggctcccctcggcttacagctaatgtgcaccgcgccgcccggagcggtccaggggcactgggccagggaggcgccgggcgcttgggactgcagcgtggagaacggcggctgcgagcacgcgtgcaatgcgatccctggggctccccgctgccagtgcccagccggcgccgccctgcaggcagacgggcgctcctgcaccgcatccgcgacgcagtcctgcaacgacctctgcgagcacttctgcgttcccaaccccgaccagccgggctcctactcgtgcatgtgcgagaccggctaccggctggcggccgaccaacaccggtgcgaggacgtggatgactgcatactggagcccagtccgtgtccgcagcgctgtgtcaacacacagggtggcttcgagtgccactgctaccctaactacgacctggtggacggcgagtgtgtggagcccgtggacccgtgcttcagagccaactgcgagtaccagtgccagcccctgaaccaaactagctacctctgcgtctgcgccgagggcttcgcgcccattccccacgagccgcacaggtgccagatgttttgcaaccagactgcctgtccagccgactgcgaccccaacacccaggctagctgtgagtgccctgaaggctacatcctggacgacggtttcatctgcacggacatcgacgagtgcgaaaacggcggcttctgctccggggtgtgccacaacctccccggtaccttcgagtgcatctgcgggcccgactcggcccttgcccgccacattggcaccgactgtgactccggcaaggtggacggtggcgacagcggctctggcgagcccccgcccagcccgacgcccggctccaccttgactcctccggccgtggggctcgtgcattcg

SEQ ID NO: 4346 - DNA, 3456 bp, Homo Sapiens
aaccgcattccagagtctggcggagacaacagcgtgtttgacatctttgaactcaccggggccgcccgcaaggggtctgggcgccgactggtgaagggccccgacccttccagcccagctttccgcatcgaggatgccaacctgatcccccctgtgcctgatgacaagttccaagacctggtggatgctgtgcgggcagaaaagggtttcctccttctggcatccctgaggcagatgaagaagacccggggcacgctgctggccctggagcggaaagaccactctggccaggtcttcagcgtggtgtccaatggcaaggcgggcaccctggacctcagcctgaccgtccaaggaaagcagcacgtggtgtctgtggaagaagctctcctggcaaccggccagtggaagagcatcaccctgtttgtgcaggaagacagggcccagctgtacatcgactgtgaaaagatggagaatgctgagttggacgtccccatccaaagcgtcttcaccagagacctggccagcatcgccagactccgcatcgcaaaggggggcgtcaatgacaatttccagggggtgctgcagaatgtgaggtttgtctttggaaccacaccagaagacatcctcaggaacaaaggctgctccagctctaccagtgtcctcctcacccttgacaacaacgtggtgaatggttccagccctgccatccgcactaactacattggccacaagacaaaggacttgcaagccatctgcggcatctcctgtgatgagctgtccagcatggtcctggaactcaggggcctgcgcaccattgtgaccacgctgcaggacagcatccgcaaagtgactgaagagaacaaagagttggccaatgagctgaggcggcctcccctatgctatcacaacggagttcagtacagaaataacgaggaatggactgttgatagctgcactgagtgtcactgtcagaactcagttaccatctgcaaaaaggtgtcctgccccatcatgccctgctccaatgccacagttcctgatggagaatgctgtcctcgctgttggcccagcgactctgcggacgatggctggtctccatggtccgagtggacctcctgttctacgagctgtggcaatggaattcagcagcgcggccgctcctgcgatagcctcaacaaccgatgtgagggctcctcggtccagacacggacctgccacattcaggagtgtgacaagagatttaaacaggatggtggctggagccactggtccccgtggtcatcttgttctgtgacatgtggtgatggtgtgatcacaaggatccggctctgcaactctcccagcccccagatgaacgggaaaccctgtgaaggcgaagcgcgggagaccaaagcctgcaagaaagacgcctgccccatcaatggaggctggggtccttggtcaccatgggacatctgttctgtcacctgtggaggaggggtacagaaacgtagtcgtctctgcaacaaccccacaccccagtttggaggcaaggactgcgttggtgatgtaacagaaaaccagatctgcaacaagcaggactgtccaattgatggatgcctgtccaatccctgctttgccggcgtgaagtgtactagctaccctgatggcagctggaaatgtggtgcttgtccccctggttacagtggaaatggcatccagtgcacagatgttgatgagtgcaaagaagtgcctgatgcctgcttcaaccacaatggagagcaccggtgtgagaacacggaccccggctacaactgcctgccctgccccccacgcttcaccggctcacagcccttcggccagggtgtcgaacatgccacggccaacaaacaggtgtgcaagccccgtaacccctgcacggatgggacccacgactgcaacaagaacgccaagtgcaactacctgggccactatagcgaccccatgtaccgctgcgagtgcaagcctggctacgctggcaatggcatcatctgcggggaggacacagacctggatggctggcccaatgagaacctggtgtgcgtggccaatgcgacttaccactgcaaaaaggataattgccccaaccttcccaactcagggcaggaagactatgacaaggatggaattggtgatgcctgtgatgatgacgatgacaatgataaaattccagatgacagggacaactgtccattccattacaacccagctcagtatgactatgacagagatgatgtgggagaccgctgtgacaactgtccctacaaccacaacccagatcaggcagacacagacaacaatggggaaggagacgcctgtgctgcagacattgatggagacggtatcctcaatgaacgggacaactgccagtacgtctacaatgtggaccagagagacactgatatggatggggttggagatcagtgtgacaattgccccttggaacacaatccggatcagctggactctgactcagaccgcattggagatacctgtgacaacaatcaggatattgatgaagatggccaccagaacaatctggacaactgtccctatgtgcccaatgccaaccaggctgaccatgacaaagatggcaagggagatgcctgtgaccacgatgatgacaacgatggcattcctgatgacaaggacaactgcagactcgtgcccaatcccgaccagaaggactctgacggcgatggtcgaggtgatgcctgcaaagatgattttgaccatgacagtgtgccagacatcgatgacatctgtcctgagaatgttgacatcagtgagaccgatttccgccgattccagatgattcctctggaccccaaagggacatcccaaaatgaccctaactgggttgtacgccatcagggtaaagaactcgtccagactgtcaactgtgatcctggactcgctgtaggttatgatgagtttaatgctgtggacttcagtggcaccttcttcatcaacaccgaaagggacgatgactatgctggatttgtctttggctaccagtccagcagccgcttttatgttgtgatgtggaagcaagtcacccagtcctactgggacaccaaccccacgagggctcagggatactcgggcctttctgtgaaagttgtaaactccaccacagggcctggcgagcacctgcggaacgccctgtggcacacaggaaacacccctggccaggtgcgcaccctgtggcatgaccctcgtcacataggctggaaagatttcaccgcctacagatggcgtctcagccacaggccaaagacgggtttcattagagtggtgatgtatgaagggaagaaaatcatggctgactcaggacccatctatgataaaacctatgctggtggtagactagggttgtttgtcttctctcaagaaatggtgttcttctctgacctgaaatacgaatgtagagatccc

SEQ ID NO: 4347 - DNA, 3462 bp, Homo Sapiens
ggtcaccaggacaaagacacgaccttcgaccttttcagtatcagcaacatcaaccgcaagaccattggcgccaagcagttccgcgggcccgaccccggcgtgccggcttaccgcttcgtgcgctttgactacatcccaccggtgaacgcagatgacctcagcaagatcaccaagatcatgcggcagaaggagggcttcttcctcacggcccagctcaagcaggacggcaagtccaggggcacgctgttggctctggagggccccggtctctcccagaggcagttcgagatcgtctccaacggccccgcggacacgctggatctcacctactggattgacggcacccggcatgtggtctccctggaggacgtcggcctggctgactcgcagtggaagaacgtcaccgtgcaggtggctggcgagacctacagcttgcacgtgggctgcgacctcatagacagcttcgctctggacgagcccttctacgagcacctgcaggcggaaaagagccggatgtacgtggccaaaggctctgccagagagagtcacttcaggggtttgcttcagaacgtccacctagtgtttgaaaactctgtggaagatattctaagcaagaagggttgccagcaaggccagggagctgagatcaacgccatcagtgagaacacagagacgctgcgcctgggtccgcatgtcaccaccgagtacgtgggccccagctcggagaggaggcccgaggtgtgcgaacgctcgtgcgaggagctgggaaacatggtccaggagctctcggggctccacgtcctcgtgaaccagctcagcgagaacctcaagagagtgtcgaatgataaccagtttctctgggagctcattggtggccctcctaagacaaggaacatgtcagcttgctggcaggatggccggttctttgcggaaaatgaaacgtgggtggtggacagctgcaccacgtgtacctgcaagaaatttaaaaccatttgccaccaaatcacctgcccgcctgcaacctgcgccagtccatcctttgtggaaggcgaatgctgcccttcctgcctccactcggtggacggtgaggagggctggtctccgtgggcagagtggacccagtgctccgtgacgtgtggctctgggacccagcagagaggccggtcctgtgacgtcaccagcaacacctgcttggggccctccatccagacacgggcttgcagtctgagcaagtgtgacacccgcatccggcaggacggcggctggagccactggtcaccttggtcttcatgctctgtgacctgtggagttggcaatatcacacgcatccgtctctgcaactccccagtgccccagatggggggcaagaattgcaaagggagtggccgggagaccaaagcctgccagggcgccccatgcccaatcgatggccgctggagcccctggtccccgtggtcggcctgcactgtcacctgtgccggtgggatccgggagcgcacccgggtctgcaacagccctgagcctcagtacggagggaaggcctgcgtgggggatgtgcaggagcgtcagatgtgcaacaagaggagctgccccgtggatggctgtttatccaacccctgcttcccgggagcccagtgcagcagcttccccgatgggtcctggtcatgcggctcctgccctgtgggcttcttgggcaatggcacccactgtgaggacctggacgagtgtgccctggtccccgacatctgcttctccaccagcaaggtgcctcgctgtgtcaacactcagcctggcttccactgcctgccctgcccgccccgatacagagggaaccagcccgtcggggtcggcctggaagcagccaagacggaaaagcaagtgtgtgagcccgaaaacccatgcaaggacaagacacacaactgccacaagcacgcggagtgcatctacctgggccacttcagcgaccccatgtacaagtgcgagtgccagacaggctacgcgggcgacgggctcatctgcggggaggactcggacctggacggctggcccaacctcaatctggtctgcgccaccaacgccacctaccactgcatcaaggataactgcccccatctgccaaattctgggcaggaagactttgacaaggacgggattggcgatgcctgtgatgatgacgatgacaatgacggtgtgaccgatgagaaggacaactgccagctcctcttcaatccccgccaggctgactatgacaaggatgaggttggggaccgctgtgacaactgcccttacgtgcacaaccctgcccagatcgacacagacaacaatggagagggtgacgcctgctccgtggacattgatggggacgatgtcttcaatgaacgagacaattgtccctacgtctacaacactgaccagagggacacggatggtgacggtgtgggggatcactgtgacaactgccccctggtgcacaaccctgaccagaccgacgtggacaatgaccttgttggggaccagtgtgacaacaacgaggacatagatgacgacggccaccagaacaaccaggacaactgcccctacatctccaacgccaaccaggctgaccatgacagagacggccagggcgacgcctgtgaccctgatgatgacaacgatggcgtccccgatgacagggacaactgccggcttgtgttcaacccagaccaggaggacttggacggtgatggacggggtgatatttgtaaagatgattttgacaatgacaacatcccagatattgatgatgtgtgtcctgaaaacaatgccatcagtgagacagacttcaggaacttccagatggtccccttggatcccaaagggaccacccaaattgatcccaactgggtcattcgccatcaaggcaaggagctggttcagacagccaactcggaccccggcatcgctgtaggttttgacgagtttgggtctgtggacttcagtggcacattctacgtaaacactgaccgggacgacgactatgccggcttcgtctttggttaccagtcaagcagccgcttctatgtggtgatgtggaagcaggtgacgcagacctactgggaggaccagcccacgcgggcctatggctactccggcgtgtccctcaaggtggtgaactccaccacggggacgggcgagcacctgaggaacgcgctgtggcacacggggaacacgccggggcaggtgcgaaccttatggcacgaccccaggaacattggctggaaggactacacggcctataggtggcacctgactcacaggcccaagactggctacatcagagtcttagtgcatgaaggaaaacaggtcatggcagactcaggacctatctatgaccaaacctacgctggcgggcggctgggtctatttgtcttctctcaagaaatggtctatttctcagacctcaagtacgaatgcagagatatt

SEQ ID NO: 4348 - DNA, 1500 bp, Homo Sapiens
actgacacagacatcgatggctacccagaccaagcactgccctgcatggacaacaacaaacactgcaaacaggacaactgccttttgacacccaactctgggcaggaagatgctgataatgatggtgtgggggaccagtgtgatgatgatgctgatggggatgggatcaagaatgttgaggacaactgccggctgttccccaacaaagaccagcagaactcagatacagattcatttggtgatgcctgtgacaattgccccaacgttcccaacaatgaccagaaggacacagatggcaatggggaaggagatgcctgtgacaacgacgtggatggggatggcatccccaatggattggacaattgccctaaagtccccaacccactacagacagacagggatgaggacggggtgggagatgcttgcgacagctgccctgaaatgagcaatcctacccagacagatgcagacagcgacctggtgggggatgtctgtgatactaatgaagacagcgatggggatgggcatcaggacaccaaggacaactgcccacagctgccaaatagctcccagctggactctgataacgatggacttggagatgagtgtgatggggatgatgacaatgatggcatcccagattatgtgcctcctggtcccgataactgccgcctggtacccaatcccaatcagaaggactcagatggcaatggcgttggtgatgtgtgtgaggatgactttgacaatgatgctgtggtcgaccccctggatgtgtgtcctgaaagtgcagaggtaacgcttacggattttcgggcctatcagaccgtcgtcctggatcctgagggtgatgctcagattgacccaaactgggttgtgctcaaccagggcatggaaatcgttcagaccatgaacagtgaccctggcttggcagttggatacacggccttcaatggtgtggactttgaaggcaccttccatgtgaacacagtgactgatgatgactacgcaggctttctcttcagttatcaagacagtggccgcttctacgtagtcatgtggaagcagaccgagcagacctactggcaggctacacccttccgggcggttgcccagcccgggctgcagctcaaggcagtgacatcagtgtctggcccaggtgagcacctccgaaatgccctgtggcatactggccacacccctgatcaggtacgactgctgtggacagacccacgaaatgtgggctggcgggacaagacctcctatcgctggcagcttctgcaccggcctcaagttggctacattcgggtgaagctctatgagggaccccagcttgtggcggattctggggtgatcattgacacatccatgcgaggggggcgtcttggtgtattctgcttctcccaagaaaacataatttggtccaatctccagtatcgatgcaatgacacagtgcctgaggactttgagccattccggaggcagctgctccagggaagggtg

SEQ ID NO: 4349 - DNA, 2805 bp, Homo Sapiens
accccccaggtctttgaccttctcccatcttccagtcagaggctaaacccaggcgctctgctgccagtcctgacagaccccgccctgaatgatctctatgtgatttccaccttcaagctgcagactaaaagttcagccaccatcttcggtctttactcttcaactgacaacagtaaatattttgaatttactgtgatgggacgcttaaacaaagccatcctccgttacctgaagaacgatgggaaggtgcatttggtggttttcaacaacctgcagctggcagacggaaggcggcacaggatcctcctgaggctgagcaatttgcagcgaggggccggctccctagagctctacctggactgcatccaggtggattccgttcacaatctccccagggcctttgctggcccctcccagaaacctgagaccattgaattgaggactttccagaggaagccacaggacttcttggaagagctgaagctggtggtgagaggctcactgttccaggtggccagcctgcaagactgcttcctgcagcagagtgagccactggctgccacaggcacaggggactttaaccggcagttcttgggtcaaatgacacaattaaaccaactcctgggagaggtgaaggaccttctgagacagcaggttaaggaaacatcatttttgcgaaacaccatagctgaatgccaggcttgcggtcctctcaagtttcagtctccgaccccaagcacggtggtgcccccggctccccctgcaccgccaacacgcccacctcgtcggtgtgactccaacccatgtttccgaggtgtccaatgtaccgacagtagagatggcttccagtgtgggccctgccccgagggctacacaggaaacgggatcacctgtattgatgttgatgagtgcaaataccatccctgctacccgggcgtgcactgcataaatttgtctcctggcttcagatgtgacgcctgcccagtgggcttcacagggcccatggtgcagggtgttgggatcagttttgccaagtcaaacaagcaggtctgcactgacattgatgagtgtcgaaatggagcgtgcgttcccaactcgatctgcgttaatactttgggatcttaccgctgtgggccttgtaagccggggtatactggtgatcagataaggggatgcaaagcggaaagaaactgcagaaacccagagctgaacccttgcagtgtgaatgcccagtgcattgaagagaggcagggggatgtgacatgtgtgtgtggagtcggttgggctggagatggctatatctgtggaaaggatgtggacatcgacagttaccccgacgaagaactgccatgctctgccaggaactgtaaaaaggacaactgcaaatatgtgccaaattctggccaagaagatgcagacagagatggcattggcgacgcttgtgacgaggatgctgacggagatgggatcctgaatgagcaggataactgtgtcctgattcataatgtggaccaaaggaacagcgataaagatatctttggggatgcctgtgataactgcctgagtgtcttaaataacgaccagaaagacaccgatggggatggaagaggagatgcctgtgatgatgacatggatggagatggaataaaaaacattctggacaactgcccaaaatttcccaatcgtgaccaacgggacaaggatggtgatggtgtgggggatgcctgtgacagttgtcctgatgtcagcaaccctaaccagtctgatgtggataatgatctggttggggactcctgtgacaccaatcaggacagtgatggagatgggcaccaggacagcacagacaactgccccaccgtcattaacagtgcccagctggacaccgataaggatggaattggtgacgagtgtgatgatgatgatgacaatgatggtatcccagacctggtgccccctggaccagacaactgccggctggtccccaacccagcccaggaggatagcaacagcgacggagtgggagacatctgtgagtctgactttgaccaggaccaggtcatcgatcggatcgacgtctgcccagagaacgcagaggtcaccctgaccgacttcagggcttaccagaccgtggtcctggatcctgaaggggatgcccagatcgatcccaactgggtggtcctgaaccagggcatggagattgtacagaccatgaacagtgatcctggcctggcagtggggtacacagcttttaatggagttgacttcgaagggaccttccatgtgaatacccagacagatgatgactatgcaggctttatctttggctaccaagatagctccagcttctacgtggtcatgtggaagcagacggagcagacatattggcaagccaccccattccgagcagttgcagaacctggcattcagctcaaggctgtgaagtctaagacaggtccaggggagcatctccggaactccctgtggcacacgggggacaccagtgaccaggtcaggctgctgtggaaggactccaggaatgtgggctggaaggacaaggtgtcctaccgctggttcctacagcacaggccccaggtgggctacatcagggtacgattttatgaaggctctgagttggtggctgactctggcgtcaccatagacaccacaatgcgtggaggccgacttggcgttttctgcttctctcaagaaaacatcatctggtccaacctcaagtatcgctgcaatgacaccatccctgaggacttccaagagtttcaaacccagaatttcgaccgcttcgataat

SEQ ID NO: 4350 - DNA, 333 bp, Homo Sapiens
cagaaggtgaccagcctaacggcctgcctagtggaccagagccttcgtctggactgccgccatgagaataccagcagttcacccatccagtacgagttcagcctgacccgtgagacaaagaagcacgtgctctttggcactgtgggggtgcctgagcacacataccgctcccgaaccaacttcaccagcaaatacaacatgaaggtcctctacttatccgccttcactagcaaggacgagggcacctacacgtgtgcactccaccactctggccattccccacccatctcctcccagaacgtcacagtgctcagagacaaactggtcaagtgt

SEQ ID NO: 4351 - DNA, 2214 bp, Homo Sapiens
gcggtggacctgacgctgctggccaacctgcggctcacggacccccagcgcttcttcctgacttgcgtgtctggggaggccggggcggggaggggctcggacgcctggggcccgcccctgctgctggagaaggacgaccgtatcgtgcgcaccccgcccgggccacccctgcgcctggcgcgcaacggttcgcaccaggtcacgcttcgcggcttctccaagccctcggacctcgtgggcgtcttctcctgcgtgggcggtgctggggcgcggcgcacgcgcgtcatctacgtgcacaacagccctggagcccacctgcttccagacaaggtcacacacactgtgaacaaaggtgacaccgctgtactttctgcacgtgtgcacaaggagaagcagacagacgtgatctggaagagcaacggatcctacttctacaccctggactggcatgaagcccaggatgggcggttcctgctgcagctcccaaatgtgcagccaccatcgagcggcatctacagtgccacttacctggaagccagccccctgggcagcgccttctttcggctcatcgtgcggggttgtggggctgggcgctgggggccaggctgtaccaaggagtgcccaggttgcctacatggaggtgtctgccacgaccatgacggcgaatgtgtatgcccccctggcttcactggcacccgctgtgaacaggcctgcagagagggccgttttgggcagagctgccaggagcagtgcccaggcatatcaggctgccggggcctcaccttctgcctcccagacccctatggctgctcttgtggatctggctggagaggaagccagtgccaagaagcttgtgcccctggtcattttggggctgattgccgactccagtgccagtgtcagaatggtggcacttgtgaccggttcagtggttgtgtctgcccctctgggtggcatggagtgcactgtgagaagtcagaccggatcccccagatcctcaacatggcctcagaactggagttcaacttagagacgatgccccggatcaactgtgcagctgcagggaaccccttccccgtgcggggcagcatagagctacgcaagccagacggcactgtgctcctgtccaccaaggccattgtggagccagagaagaccacagctgagttcgaggtgccccgcttggttcttgcggacagtgggttctgggagtgccgtgtgtccacatctggcggccaagacagccggcgcttcaaggtcaatgtgaaagtgccccccgtgcccctggctgcacctcggctcctgaccaagcagagccgccagcttgtggtctccccgctggtctcgttctctggggatggacccatctccactgtccgcctgcactaccggccccaggacagtaccatggactggtcgaccattgtggtggaccccagtgagaacgtgacgttaatgaacctgaggccaaagacaggatacagtgttcgtgtgcagctgagccggccaggggaaggaggagagggggcctgggggcctcccaccctcatgaccacagactgtcctgagcctttgttgcagccgtggttggagggctggcatgtggaaggcactgaccggctgcgagtgagctggtccttgcccttggtgcccgggccactggtgggcgacggtttcctgctgcgcctgtgggacgggacacgggggcaggagcggcgggagaacgtctcatccccccaggcccgcactgccctcctgacgggactcacgcctggcacccactaccagctggatgtgcagctctaccactgcaccctcctgggcccggcctcgccccctgcacacgtgcttctgccccccagtgggcctccagccccccgacacctccacgcccaggccctctcagactccgagatccagctgacatggaagcacccggaggctctgcctgggccaatatccaagtacgttgtggaggtgcaggtggctgggggtgcaggagacccactgtggatagacgtggacaggcctgaggagacaagcaccatcatccgtggcctcaacgccagcacgcgctacctcttccgcatgcgggccagcattcaggggctcggggactggagcaacacagtagaagagtccaccctgggcaacgggctgcaggctgagggcccagtccaagagagccgggcagctgaagagggcctggatcag

SEQ ID NO: 4352 - DNA, 360 bp, Homo Sapiens
atgatgacaggcacaatagaaacaacggggaacatttctgcagagaaaggtggctctatcatcttacaatgtcacctctcctccaccacggcacaagtgacccaggtcaactgggagcagcaggaccagcttctggccatttgtaatgctgacttggggtggcacatctccccatccttcaaggatcgagtggccccaggtcccggcctgggcctcaccctccagtcgctgaccgtgaacgatacaggggagtacttctgcatctatcacacctaccctgatgggacgtacactgggagaatcttcctggaggtcctagaaagctcagtggctgagcacggtgccaggttccagattcca

SEQ ID NO: 4353 - DNA, 870 bp, Homo Sapiens
gagactgttgtgacggaggttttgggtcaccgggtgactttgccctgtctgtactcatcctggtctcacaacagcaacagcatgtgctgggggaaagaccagtgcccctactccggttgcaaggaggcgctcatccgcactgatggaatgagggtgacctcaagaaagtcagcaaaatatagacttcaggggactatcccgagaggtgatgtctccttgaccatcttaaaccccagtgaaagtgacagcggtgtgtactgctgccgcatagaagtgcctggctggttcaacgatgtaaagataaacgtgcgcctgaatctacagagagcctcaacaaccacgcacagaacagcaaccaccaccacacgcagaacaacaacaacaagccccaccaccacccgacaaatgacaacaaccccagctgcacttccaacaacagtcgtgaccacacccgatctcacaaccggaacaccactccagatgacaaccattgccgtcttcacaacagcaaacacgtgcctttcactaaccccaagcacccttccggaggaagccacaggtcttctgactcccgagccttctaaggaagggcccatcctcactgcagaatcagaaactgtcctccccagtgattcctggagtagtgctgagtctacttctgctgacactgtcctgctgacatccaaagagtccaaagtttgggatctcccatcaacatcccacgtgtcaatgtggaaaacgagtgattctgtgtcttctcctcagcctggagcatctgatacagcagttcctgagcagaacaaaacaacaaaaacaggacagatggatggaatacccatgtcaatgaagaatgaaatgcccatctcccaa

SEQ ID NO: 4354 - DNA, 2598 bp, Homo Sapiens
gccgctacatcaagaacggaaagaatatggcctggaggcgttattccttatgttataggaggaaacttcactggcagccagagagccatgttcaagcaggccatgaggcactgggaaaagcacacatgtgtgactttcatagaaagaagtgatgaagagagttacattgtattcacctataggccttgtggatgctgctcctatgtaggtcggcgaggaaatggacctcaggcaatctctatcggcaagaactgtgataaatttgggattgttgttcatgaattgggtcatgtgataggcttttggcatgaacacacaagaccagatcgagataaccacgtaactatcataagagaaaacatccagccaggtcaagagtacaattttctgaagatggagcctggagaagtaaactcacttggagaaagatatgatttcgacagtatcatgcactatgccaggaacaccttctcaagggggatgtttctggataccattctcccctcccgtgatgataatggcatacgtcctgcaattggtcagcgaacccgtctaagcaaaggagatatcgcacaggcaagaaagctgtatagatgtccagcatgtggagaaactctacaagaatccaatggcaacctttcctctccaggatttcccaatggctacccttcttacacacactgcatctggagagtttctgtgaccccaggggagaagattgttttaaattttacaacgatggatctatacaagagtagtttgtgctggtatgactatattgaagtaagagacgggtactggagaaaatcacctctccttggtagattctgtggggacaaattgcctgaagttcttacttctacagacagcagaatgtggattgagtttcgtagcagcagtaattgggtaggaaaaggctttgcagctgtctatgaagcgatctgtggaggtgagatacgtaaaaatgaaggacagattcagtctcccaattatcctgatgactatcgcccgatgaaagaatgtgtgtggaaaataacagtgtctgagagctaccacgtcgggctgacctttcagtcctttgagattgaaagacatgacaattgtgcttatgactacctggaagttagagatggaaccagtgaaaatagccctttgatagggcgtttctgtggttatgacaaacctgaagacataagatctacctccaatactttgtggatgaagtttgtttctgacggaactgtgaacaaagcagggtttgctgctaacttttttaaagaggaagatgagtgtgccaaacctgaccgtggaggctgtgagcagcgatgtctgaacactctgggcagttaccagtgtgcctgtgagcctggctatgagctgggcccagacagaaggagctgtgaagctgcttgtggtggacttcttaccaaacttaacggcaccataaccacccctggctggcccaaggagtaccctcctaataagaactgtgtgtggcaagtggttgcaccaacccagtacagaatttctgtgaagtttgagttttttgaattggaaggcaatgaagtttgcaaatatgattatgtggagatctggagtggtctttcctctgagtctaaactgcatggcaaattctgtggcgctgaagtgcctgaagtgatcacatcccagttcaacaatatgagaattgaattcaaatctgacaatactgtatccaagaagggcttcaaagcacattttttctcagacaaagatgaatgctctaaggataatggtggatgtcagcacgaatgtgtcaacacgatggggagctacatgtgtcaatgccgtaatggatttgtgctacatgacaataaacatgattgcaaggaagctgagtgtgaacagaagatccacagtccaagtggcctcatcaccagtcccaactggccagacaagtacccaagcaggaaagaatgcacttgggaaatcagcgccactcctggccaccgaatcaaattagcctttagtgaatttgagattgagcagcatcaagaatgtgcttatgaccacttagaagtatttgatggagaaacagaaaagtcaccgattcttggacgactatgtggcaacaagataccagatccccttgtggctactggaaataaaatgtttgttcggtttgtttctgatgcatctgttcaaagaaaaggctttcaagccacacattctacagagtgtggcggacgattgaaagcagaatcaaaaccaagagatctgtactcacatgctcagtttggtgataacaactacccaggacaggttgactgtgaatggctattagtatcagaacggggctctcgacttgaattatccttccagacatttgaagtggaggaagaagcagactgtggctatgactatgtggagctctttgatggtcttgattcaacagctgtggggcttggtcgattctgtggatccgggccaccagaagagatttattcaattggagattcagttttaattcatttccacactgatgacacaatcaacaagaagggatttcatataagatacaaaagcataagatatccagataccacacataccaaaaaa

SEQ ID NO: 4355 - DNA, 2598 bp, Homo Sapiens
gccacaacctcaaggacagagaggatatggcctggaggagtcatcccctacgtcattggagggaacttcactgggagccagagggccatttttaagcaggccatgagacactgggagaagcacacctgtgtgaccttcatagaaaggacggatgaggaaagctttattgtattcagttacagaacctgtggctgttgctcctatgttgggcgccgaggaggaggcccacaggccatatccattgggaagaactgtgacaagtttggcattgtggctcacgagctgggccatgtggttgggttttggcatgaacacacccggccagacagagaccaacatgtcaccatcatcagggaaaacatccagccaggtcaggagtataatttcttaaaaatggaagctggggaagtgagctctctgggagagacatacgactttgacagcatcatgcactacgcccggaacaccttctcaagaggagttttcttagacaccatccttccccgtcaagatgacaatggcgtcaggccaaccattggccagcgcgtgcggctcagtcagggagacatagctcaagcccggaagctgtacaaatgcccagcgtgtggggagaccctgcaggacacaacgggaaacttttctgcacctggtttcccaaatgggtacccatcttactcccactgcgtctggaggatctcggtcaccccaggggaaaagatcgtattaaacttcacatccatggatttgtttaaaagccgactgtgctggtatgattacgtggaggtccgggatggttactggagaaaagccccccttttgggcaggttttgtggcgataagatcccggagcccctcgtctccacggacagccggctctgggtggagttccgcagcagcagcaacatcttgggcaagggcttctttgcagcgtacgaagctacctgcgggggagacatgaacaaagatgccggtcagattcaatctcccaactatccggatgactacagaccttccaaggaatgtgtctggaggattacggtttcagaggggtttcacgtgggacttaccttccaagcttttgagattgaaaggcacgacagctgtgcatatgactacctggaagtccgggatggccccacggaagagagtgccctgatcggccacttttgtggctatgagaagccggaggatgtgaaatcgagctccaacagactgtggatgaagtttgtgtccgatggctctatcaataaagcgggctttgcagccaattttttcaaggaggtggatgagtgttcctggccagatcacggcgggtgcgagcatcgctgtgtgaacacgctgggcagctacaagtgtgcctgtgaccctggctacgagctggccgccgataagaagatgtgtgaagtggcctgtggcggtttcattaccaagctgaatggaaccatcaccagccctgggtggccgaaggagtatcccacaaacaaaaactgtgtctggcaggtggtggcccccgctcagtaccggatctcccttcagtttgaagtgtttgaactggaaggcaatgacgtctgtaagtacgactttgtagaggtgcgcagcggcctgtcccccgacgccaagctgcacggcaggttctgcggctctgagacgccggaggtcatcacctcgcagagcaacaacatgcgcgtggagttcaagtccgacaacaccgtctccaagcgcggcttcagggcccacttcttctcagataaggacgagtgtgccaaggacaacggcgggtgtcagcatgagtgcgtcaacaccttcgggagctacctgtgcaggtgcagaaacggctactggctccacgagaatgggcatgactgcaaagaggctggctgtgcacacaagatcagcagtgtggaggggaccctggcgagccccaactggcctgacaaataccccagccggagggagtgtacctggaacatctcttcgactgcaggccacagagtgaaactcacctttaatgagtttgagatcgagcagcaccaggaatgtgcctatgaccacctggaaatgtatgacgggccggacagcctggcccccattctgggccgtttctgcggcagcaagaaaccagaccccacggtggcttccggcagcagtatgtttctcaggttttattcggatgcctcagtgcagaggaaaggcttccaggcagtgcacagcacagagtgcgggggcaggctgaaggctgaagtgcagaccaaagagctctattcccacgcccagtttggggacaacaactacccgagcgaggcccgctgtgactgggtgatcgtggcagaggacggctacggcgtggagctgacattccggacctttgaggttgaggaggaggccgactgcggctacgactacatggaagcctacgacggctacgacagctcagcgcccaggctcggccgcttctgtggctctgggccattagaagaaatctactctgcaggtgattccctgatgattcgattccgcacagatgacaccatcaacaagaaaggctttcatgcccgatacaccagcaccaagttccaggatgccctgcacatgaagaaa

SEQ ID NO: 4356 - DNA, 1668 bp, Homo Sapiens
agtgaatttttagttgataggtcaaaaaacggtctcatccacgttcctaaagacctatcccagaaaacaacaatcttaaatatatcgcaaaattatatatctgagctttggacttctgacatcttatcactgtcaaaactgaggattttgataatttctcataatagaatccagtatcttgatatcagtgttttcaaattcaaccaggaattggaatacttggatttgtcccacaacaagttggtgaagatttcttgccaccctactgtgaacctcaagcacttggacctgtcatttaatgcatttgatgccctgcctatatgcaaagagtttggcaatatgtctcaactaaaatttctggggttgagcaccacacacttagaaaaatctagtgtgctgccaattgctcatttgaatatcagcaaggtcttgctggtcttaggagagacttatggggaaaaagaagaccctgagggccttcaagactttaacactgagagtctgcacattgtgttccccacaaacaaagaattccattttattttggatgtgtcagtcaagactgtagcaaatctggaactatctaatatcaaatgtgtgctagaagataacaaatgttcttacttcctaagtattctggcgaaacttcaaacaaatccaaagttatcaaatcttaccttaaacaacattgaaacaacttggaattctttcattaggatcctccagctggtttggcatacaactgtatggtatttctcaatttcaaacgtgaagctacagggtcagctggacttcagagattttgattattctggcacttccttgaaggccttgtctatacaccaagttgtcagcgatgtgttcggttttccgcaaagttatatctatgaaatcttttcgaatatgaacatcaaaaatttcacagtgtctggtacacgcatggtccacatgctttgcccatccaaaattagcccgttcctgcatttggatttttccaataatctcttaacagacacggtttttgaaaattgtgggcaccttactgagttggagacacttattttacaaatgaatcaattaaaagaactttcaaaaatagctgaaatgactacacagatgaagtctctgcaacaattggatattagccagaattctgtaagctatgatgaaaagaaaggagactgttcttggactaaaagtttattaagtttaaatatgtcttcaaatatacttactgacactattttcagatgtttacctcccaggatcaaggtacttgatcttcacagcaataaaataaagagcattcctaaacaagtcgtaaaactggaagctttgcaagaactcaatgttgctttcaattctttaactgaccttcctggatgtggcagctttagcagcctttctgtattgatcattgatcacaattcagtttcccacccatcggctgatttcttccagagctgccagaagatgaggtcaataaaagcaggggacaatccattccaatgtacctgtgagctaggagaatttgtcaaaaatatagaccaagtatcaagtgaagtgttagagggctggcctgattcttataagtgtgactacccggaaagttatagaggaaccctactaaaggactttcacatgtctgaattatcctgcaacataact

SEQ ID NO: 4357 - DNA, 1671 bp, Homo Sapiens
gatgctccagagctgccagaagaaagggaactgatgaccaactgctccaacatgtctctaagaaaggttcccgcagacttgaccccagccacaacgacactggatttatcctataacctcctttttcaactccagagttcagattttcattctgtctccaaactgagagttttgattctatgccataacagaattcaacagctggatctcaaaacctttgaattcaacaaggagttaagatatttagatttgtctaataacagactgaagagtgtaacttggtatttactggcaggtctcaggtatttagatctttcttttaatgactttgacaccatgcctatctgtgaggaagctggcaacatgtcacacctggaaatcctaggtttgagtggggcaaaaatacaaaaatcagatttccagaaaattgctcatctgcatctaaatactgtcttcttaggattcagaactcttcctcattatgaagaaggtagcctgcccatcttaaacacaacaaaactgcacattgttttaccaatggacacaaatttctgggttcttttgcgtgatggaatcaagacttcaaaaatattagaaatgacaaatatagatggcaaaagccaatttgtaagttatgaaatgcaacgaaatcttagtttagaaaatgctaagacatcggttctattgcttaataaagttgatttactctgggacgaccttttccttatcttacaatttgtttggcatacatcagtggaacactttcagatccgaaatgtgacttttggtggtaaggcttatcttgaccacaattcatttgactactcaaatactgtaatgagaactataaaattggagcatgtacatttcagagtgttttacattcaacaggataaaatctatttgcttttgaccaaaatggacatagaaaacctgacaatatcaaatgcacaaatgccacacatgcttttcccgaattatcctacgaaattccaatatttaaattttgccaataatatcttaacagacgagttgtttaaaagaactatccaactgcctcacttgaaaactctcattttgaatggcaataaactggagacactttctttagtaagttgctttgctaacaacacacccttggaacacttggatctgagtcaaaatctattacaacataaaaatgatgaaaattgctcatggccagaaactgtggtcaatatgaatctgtcatacaataaattgtctgattctgtcttcaggtgcttgcccaaaagtattcaaatacttgacctaaataataaccaaatccaaactgtacctaaagagactattcatctgatggccttacgagaactaaatattgcatttaattttctaactgatctccctggatgcagtcatttcagtagactttcagttctgaacattgaaatgaacttcattctcagcccatctctggattttgttcagagctgccaggaagttaaaactctaaatgcgggaagaaatccattccggtgtacctgtgaattaaaaaatttcattcagcttgaaacatattcagaggtcatgatggttggatggtcagattcatacacctgtgaataccctttaaacctaaggggaactaggttaaaagacgttcatctccacgaattatcttgcaacaca

SEQ ID NO: 4358 - DNA, 1704 bp, Homo Sapiens
gaatcctccaatcaggcttctctgtcttgtgaccgcaatggtatctgcaagggcagctcaggatctttaaactccattccctcagggctcacagaagctgtaaaaagccttgacctgtccaacaacaggatcacctacattagcaacagtgacctacagaggtgtgtgaacctccaggctctggtgctgacatccaatggaattaacacaatagaggaagattctttttcttccctgggcagtcttgaacatttagacttatcctataattacttatctaatttatcgtcttcctggttcaagcccctttcttctttaacattcttaaacttactgggaaatccttacaaaaccctaggggaaacatctcttttttctcatctcacaaaattgcaaatcctgagagtgggaaatatggacaccttcactaagattcaaagaaaagattttgctggacttaccttccttgaggaacttgagattgatgcttcagatctacagagctatgagccaaaaagtttgaagtcaattcagaacgtaagtcatctgatccttcatatgaagcagcatattttactgctggagatttttgtagatgttacaagttccgtggaatgtttggaactgcgagatactgatttggacactttccatttttcagaactatccactggtgaaacaaattcattgattaaaaagtttacatttagaaatgtgaaaatcaccgatgaaagtttgtttcaggttatgaaacttttgaatcagatttctggattgttagaattagagtttgatgactgtacccttaatggagttggtaattttagagcatctgataatgacagagttatagatccaggtaaagtggaaacgttaacaatccggaggctgcatattccaaggttttacttattttatgatctgagcactttatattcacttacagaaagagttaaaagaatcacagtagaaaacagtaaagtttttctggttccttgtttactttcacaacatttaaaatcattagaatacttggatctcagtgaaaatttgatggttgaagaatacttgaaaaattcagcctgtgaggatgcctggccctctctacaaactttaattttaaggcaaaatcatttggcatcattggaaaaaaccggagagactttgctcactctgaaaaacttgactaacattgatatcagtaagaatagttttcattctatgcctgaaacttgtcagtggccagaaaagatgaaatatttgaacttatccagcacacgaatacacagtgtaacaggctgcattcccaagacactggaaattttagatgttagcaacaacaatctcaatttattttctttgaatttgccgcaactcaaagaactttatatttccagaaataagttgatgactctaccagatgcctccctcttacccatgttactagtattgaaaatcagtaggaatgcaataactacgttttctaaggagcaacttgactcatttcacacactgaagactttggaagctggtggcaataacttcatttgctcctgtgaattcctctccttcactcaggagcagcaagcactggccaaagtcttgattgattggccagcaaattacctgtgtgactctccatcccatgtgcgtggccagcaggttcaggatgtccgcctctcggtgtcggaatgtcacaggaca

SEQ ID NO: 4359 - DNA, 2043 bp, Homo Sapiens
tccaccaccaagtgcactgttagccatgaagttgctgactgcagccacctgaagttgactcaggtacccgatgatctacccacaaacataacagtgttgaaccttacccataatcaactcagaagattaccagccgccaacttcacaaggtatagccagctaactagcttggatgtaggatttaacaccatctcaaaactggagccagaattgtgccagaaacttcccatgttaaaagttttgaacctccagcacaatgagctatctcaactttctgataaaacctttgccttctgcacgaatttgactgaactccatctcatgtccaactcaatccagaaaattaaaaataatccctttgtcaagcagaagaatttaatcacattagatctgtctcataatggcttgtcatctacaaaattaggaactcaggttcagctggaaaatctccaagagcttctattatcaaacaataaaattcaagcgctaaaaagtgaagaactggatatctttgccaattcatctttaaaaaaattagagttgtcatcgaatcaaattaaagagttttctccagggtgttttcacgcaattggaagattatttggcctctttctgaacaatgtccagctgggtcccagccttacagagaagctatgtttggaattagcaaacacaagcattcggaatctgtctctgagtaacagccagctgtccaccaccagcaatacaactttcttgggactaaagtggacaaatctcactatgctcgatctttcctacaacaacttaaatgtggttggtaacgattcctttgcttggcttccacaactagaatatttcttcctagagtataataatatacagcatttgttttctcactctttgcacgggcttttcaatgtgaggtacctgaatttgaaacggtcttttactaaacaaagtatttcccttgcctcactccccaagattgatgatttttcttttcagtggctaaaatgtttggagcaccttaacatggaagataatgatattccaggcataaaaagcaatatgttcacaggattgataaacctgaaatacttaagtctatccaactcctttacaagtttgcgaactttgacaaatgaaacatttgtatcacttgctcattctcccttacacatactcaacctaaccaagaataaaatctcaaaaatagagagtgatgctttctcttggttgggccacctagaagtacttgacctgggccttaatgaaattgggcaagaactcacaggccaggaatggagaggtctagaaaatattttcgaaatctatctttcctacaacaagtacctgcagctgactaggaactcctttgccttggtcccaagccttcaacgactgatgctccgaagggtggcccttaaaaatgtggatagctctccttcaccattccagcctcttcgtaacttgaccattctggatctaagcaacaacaacatagccaacataaatgatgacatgttggagggtcttgagaaactagaaattctcgatttgcagcataacaacttagcacggctctggaaacacgcaaaccctggtggtcccatttatttcctaaagggtctgtctcacctccacatccttaacttggagtccaacggctttgacgagatcccagttgaggtcttcaaggatttatttgaactaaagatcatcgatttaggattgaataatttaaacacacttccagcatctgtctttaataatcaggtgtctctaaagtcattgaaccttcagaagaatctcataacatccgttgagaagaaggttttcgggccagctttcaggaacctgactgagttagatatgcgctttaatccctttgattgcacgtgtgaaagtattgcctggtttgttaattggattaacgagacccataccaacatccctgagctgtcaagccactacctttgcaacactccacctcactatcatgggttcccagtgagactttttgatacatcatcttgcaaagacagtgccccctttgaactc

SEQ ID NO: 4360 - DNA, 1824 bp, Homo Sapiens
gaaagctgggagccctgcgtggaggtggttcctaatattacttatcaatgcatggagctgaatttctacaaaatccccgacaacctccccttctcaaccaagaacctggacctgagctttaatcccctgaggcatttaggcagctatagcttcttcagtttcccagaactgcaggtgctggatttatccaggtgtgaaatccagacaattgaagatggggcatatcagagcctaagccacctctctaccttaatattgacaggaaaccccatccagagtttagccctgggagccttttctggactatcaagtttacagaagctggtggctgtggagacaaatctagcatctctagagaacttccccattggacatctcaaaactttgaaagaacttaatgtggctcacaatcttatccaatctttcaaattacctgagtatttttctaatctgaccaatctagagcacttggacctttccagcaacaagattcaaagtatttattgcacagacttgcgggttctacatcaaatgcccctactcaatctctctttagacctgtccctgaaccctatgaactttatccaaccaggtgcatttaaagaaattaggcttcataagctgactttaagaaataattttgatagtttaaatgtaatgaaaacttgtattcaaggtctggctggtttagaagtccatcgtttggttctgggagaatttagaaatgaaggaaacttggaaaagtttgacaaatctgctctagagggcctgtgcaatttgaccattgaagaattccgattagcatacttagactactacctcgatgatattattgacttatttaattgtttgacaaatgtttcttcattttccctggtgagtgtgactattgaaagggtaaaagacttttcttataatttcggatggcaacatttagaattagttaactgtaaatttggacagtttcccacattgaaactcaaatctctcaaaaggcttactttcacttccaacaaaggtgggaatgctttttcagaagttgatctaccaagccttgagtttctagatctcagtagaaatggcttgagtttcaaaggttgctgttctcaaagtgattttgggacaaccagcctaaagtatttagatctgagcttcaatggtgttattaccatgagttcaaacttcttgggcttagaacaactagaacatctggatttccagcattccaatttgaaacaaatgagtgagttttcagtattcctatcactcagaaacctcatttaccttgacatttctcatactcacaccagagttgctttcaatggcatcttcaatggcttgtccagtctcgaagtcttgaaaatggctggcaattctttccaggaaaacttccttccagatatcttcacagagctgagaaacttgaccttcctggacctctctcagtgtcaactggagcagttgtctccaacagcatttaactcactctccagtcttcaggtactaaatatgagccacaacaacttcttttcattggatacgtttccttataagtgtctgaactccctccaggttcttgattacagtctcaatcacataatgacttccaaaaaacaggaactacagcattttccaagtagtctagctttcttaaatcttactcagaatgactttgcttgtacttgtgaacaccagagtttcctgcaatggatcaaggaccagaggcagctcttggtggaagttgaacgaatggaatgtgcaacaccttcagataagcagggcatgcctgtgctgagtttgaatatcacctgtcagatgaataag

SEQ ID NO: 4361 - DNA, 1857 bp, Homo Sapiens
attccttcctgctcctttgatggccgaatagccttttatcgtttctgcaacctcacccaggtcccccaggtcctcaacaccactgagaggctcctgctgagcttcaactatatcaggacagtcactgcttcatccttcccctttctggaacagctgcagctgctggagctcgggagccagtatacccccttgactattgacaaggaggccttcagaaacctgcccaaccttagaatcttggacctgggaagtagtaagatatacttcttgcatccagatgcttttcagggactgttccatctgtttgaacttagactgtatttctgtggtctctctgatgctgtattgaaagatggttatttcagaaatttaaaggctttaactcgcttggatctatccaaaaatcagattcgtagcctttaccttcatccttcatttgggaagttgaattccttaaagtccatagatttttcctccaaccaaatattccttgtatgtgaacatgagctcgagcccctacaagggaaaacgctctccttttttagcctcgcagctaatagcttgtatagcagagtctcagtggactggggaaaatgtatgaacccattcagaaacatggtgctggagatactagatgtttctggaaatggctggacagtggacatcacaggaaactttagcaatgccatcagcaaaagccaggccttctctttgattcttgcccaccacatcatgggtgccgggtttggcttccataacatcaaagatcctgaccagaacacatttgctggcctggccagaagttcagtgagacacctggatctttcacatgggtttgtcttctccctgaactcacgagtctttgagacactcaaggatttgaaggttctgaaccttgcctacaacaagataaataagattgcagatgaagcattttacggacttgacaacctccaagttctcaatttgtcatataaccttctgggggaactttacagttcgaatttctatggactacctaaggtagcctacattgatttgcaaaagaatcacattgcaataattcaagaccaaacattcaaattcctggaaaaattacagaccttggatctccgagacaatgctcttacaaccattcattttattccaagcatacccgatatcttcttgagtggcaataaactagtgactttgccaaagatcaaccttacagcgaacctcatccacttatcagaaaacaggctagaaaatctagatattctctactttctcctacgggtacctcatctccagattctcattttaaatcaaaatcgcttctcctcctgtagtggagatcaaaccccttcagagaatcccagcttagaacagcttttccttggagaaaatatgttgcaacttgcctgggaaactgagctctgttgggatgtttttgagggactttctcatcttcaagttctgtatttgaatcataactatcttaattcccttccaccaggagtatttagccatctgactgcattaaggggactaagcctcaactccaacaggctgacagttctttctcacaatgatttacctgctaatttagagatcctggacatatccaggaaccagctcctagctcctaatcctgatgtatttgtatcacttagtgtcttggatataactcataacaagttcatttgtgaatgtgaacttagcacttttatcaattggcttaatcacaccaatgtcactatagctgggcctcctgcagacatatattgtgtgtaccctgactcgttctctggggtttccctcttctctctttccacggaaggttgtgatgaagaggaagtcttaaagtccctaaag

SEQ ID NO: 4362 - DNA, 1347 bp, Homo Sapiens
aatgaatttgcagtagacaagtcaaaaagaggtcttattcatgttccaaaagacctaccgctgaaaaccaaagtcttagatatgtctcagaactacatcgctgagcttcaggtctctgacatgagctttctatcagagttgacagttttgagactttcccataacagaatccagctacttgatttaagtgttttcaagttcaaccaggatttagaatatttggatttatctcataatcagttgcaaaagatatcctgccatcctattgtgagtttcaggcatttagatctctcattcaatgatttcaaggccctgcccatctgtaaggaatttggcaacttatcacaactgaatttcttgggattgagtgctatgaagctgcaaaaattagatttgctgccaattgctcacttgcatctaagttatatccttctggatttaagaaattattatataaaagaaaatgagacagaaagtctacaaattctgaatgcaaaaacccttcaccttgtttttcacccaactagtttattcgctatccaagtgaacatatcagttaatactttagggtgcttacaactgactaatattaaattgaatgatgacaactgtcaagttttcattaaatttttatcagaactcaccagaggtccaaccttactgaattttaccctcaaccacatagaaacgacttggaaatgcctggtcagagtctttcaatttctttggcccaaacctgtggaatatctcaatatttacaatttaacaataattgaaagcattcgtgaagaagattttacttattctaaaacgacattgaaagcattgacaatagaacatatcacgaaccaagtttttctgttttcacagacagctttgtacaccgtgttttctgagatgaacattatgatgttaaccatttcagatacaccttttatacacatgctgtgtcctcatgcaccaagcacattcaagtttttgaactttacgcagaacgttttcacagatagtatttttgaaaaatgttccacgttagttaaattggagacacttatctttgttttgtctcccaactttgtccagagtgagtggtgccattacgaactctattttgcccatcacaatctctttcatgaaggatctaataacttaatcctcatcttactggaacccattccacagaacagcattcccaacaagtaccacaagctgaaggctctcatgacgcagcggacttatttgcagtggcccaaggagaaaagcaaacgtgggctcttttgggctaacattagagccgcttttaatatgaaattaacactagtcactgaaaacaatgatgtgaaatct

SEQ ID NO: 4363 - DNA, 2439 bp, Homo Sapiens
gctagatggtttcctaaaactctgccctgtgatgtcactctggatgttccaaagaaccatgtgatcgtggactgcacagacaagcatttgacagaaattcctggaggtattcccacgaacaccacgaacctcaccctcaccattaaccacataccagacatctccccagcgtcctttcacagactggaccatctggtagagatcgatttcagatgcaactgtgtacctattccactggggtcaaaaaacaacatgtgcatcaagaggctgcagattaaacccagaagctttagtggactcacttatttaaaatccctttacctggatggaaaccagctactagagataccgcagggcctcccgcctagcttacagcttctcagccttgaggccaacaacatcttttccatcagaaaagagaatctaacagaactggccaacatagaaatactctacctgggccaaaactgttattatcgaaatccttgttatgtttcatattcaatagagaaagatgccttcctaaacttgacaaagttaaaagtgctctccctgaaagataacaatgtcacagccgtccctactgttttgccatctactttaacagaactatatctctacaacaacatgattgcaaaaatccaagaagatgattttaataacctcaaccaattacaaattcttgacctaagtggaaattgccctcgttgttataatgccccatttccttgtgcgccgtgtaaaaataattctcccctacagatccctgtaaatgcttttgatgcgctgacagaattaaaagttttacgtctacacagtaactctcttcagcatgtgcccccaagatggtttaagaacatcaacaaactccaggaactggatctgtcccaaaacttcttggccaaagaaattggggatgctaaatttctgcattttctccccagcctcatccaattggatctgtctttcaattttgaacttcaggtctatcgtgcatctatgaatctatcacaagcattttcttcactgaaaagcctgaaaattctgcggatcagaggatatgtctttaaagagttgaaaagctttaacctctcgccattacataatcttcaaaatcttgaagttcttgatcttggcactaactttataaaaattgctaacctcagcatgtttaaacaatttaaaagactgaaagtcatagatctttcagtgaataaaatatcaccttcaggagattcaagtgaagttggcttctgctcaaatgccagaacttctgtagaaagttatgaaccccaggtcctggaacaattacattatttcagatatgataagtatgcaaggagttgcagattcaaaaacaaagaggcttctttcatgtctgttaatgaaagctgctacaagtatgggcagaccttggatctaagtaaaaatagtatattttttgtcaagtcctctgattttcagcatctttctttcctcaaatgcctgaatctgtcaggaaatctcattagccaaactcttaatggcagtgaattccaacctttagcagagctgagatatttggacttctccaacaaccggcttgatttactccattcaacagcatttgaagagcttcacaaactggaagttctggatataagcagtaatagccattattttcaatcagaaggaattactcatatgctaaactttaccaagaacctaaaggttctgcagaaactgatgatgaacgacaatgacatctcttcctccaccagcaggaccatggagagtgagtctcttagaactctggaattcagaggaaatcacttagatgttttatggagagaaggtgataacagatacttacaattattcaagaatctgctaaaattagaggaattagacatctctaaaaattccctaagtttcttgccttctggagtttttgatggtatgcctccaaatctaaagaatctctctttggccaaaaatgggctcaaatctttcagttggaagaaactccagtgtctaaagaacctggaaactttggacctcagccacaaccaactgaccactgtccctgagagattatccaactgttccagaagcctcaagaatctgattcttaagaataatcaaatcaggagtctgacgaagtattttctacaagatgccttccagttgcgatatctggatctcagctcaaataaaatccagatgatccaaaagaccagcttcccagaaaatgtcctcaacaatctgaagatgttgcttttgcatcataatcggtttctgtgcacctgtgatgctgtgtggtttgtctggtgggttaaccatacagaggtgactattccttacctggccacagatgtgacttgtgtggggccaggagcacacaagggccaaagtgtgatctccctggatctgtacacctgtgagttagatctgactaac

SEQ ID NO: 4364 - DNA, 2403 bp, Homo Sapiens
gaagaaaatttttctagaagctatccttgtgatgagaaaaagcaaaatgactcagttattgcagagtgcagcaatcgtcgactacaggaagttccccaaacggtgggcaaatatgtgacagaactagacctgtctgataatttcatcacacacataacgaatgaatcatttcaagggctgcaaaatctcactaaaataaatctaaaccacaaccccaatgtacagcaccagaacggaaatcccggtatacaatcaaatggcttgaatatcacagacggggcattcctcaacctaaaaaacctaagggagttactgcttgaagacaaccagttaccccaaataccctctggtttgccagagtctttgacagaacttagtctaattcaaaacaatatatacaacataactaaagagggcatttcaagacttataaacttgaaaaatctctatttggcctggaactgctattttaacaaagtttgcgagaaaactaacatagaagatggagtatttgaaacgctgacaaatttggagttgctatcactatctttcaattctctttcacacgtgccacccaaactgccaagctccctacgcaaactttttctgagcaacacccagatcaaatacattagtgaagaagatttcaagggattgataaatttaacattactagatttaagcgggaactgtccgaggtgcttcaatgccccatttccatgcgtgccttgtgatggtggtgcttcaattaatatagatcgttttgcttttcaaaacttgacccaacttcgatacctaaacctctctagcacttccctcaggaagattaatgctgcctggtttaaaaatatgcctcatctgaaggtgctggatcttgaattcaactatttagtgggagaaatagcctctggggcatttttaacgatgctgccccgcttagaaatacttgacttgtcttttaactatataaaggggagttatccacagcatattaatatttccagaaacttctctaaacttttgtctctacgggcattgcatttaagaggttatgtgttccaggaactcagagaagatgatttccagcccctgatgcagcttccaaacttatcgactatcaacttgggtattaattttattaagcaaatcgatttcaaacttttccaaaatttctccaatctggaaattatttacttgtcagaaaacagaatatcaccgttggtaaaagatacccggcagagttatgcaaatagttcctcttttcaacgtcatatccggaaacgacgctcaacagattttgagtttgacccacattcgaacttttatcatttcacccgtcctttaataaagccacaatgtgctgcttatggaaaagccttagatttaagcctcaacagtattttcttcattgggccaaaccaatttgaaaatcttcctgacattgcctgtttaaatctgtctgcaaatagcaatgctcaagtgttaagtggaactgaattttcagccattcctcatgtcaaatatttggatttgacaaacaatagactagactttgataatgctagtgctcttactgaattgtccgacttggaagttctagatctcagctataattcacactatttcagaatagcaggcgtaacacatcatctagaatttattcaaaatttcacaaatctaaaagttttaaacttgagccacaacaacatttatactttaacagataagtataacctggaaagcaagtccctggtagaattagttttcagtggcaatcgccttgacattttgtggaatgatgatgacaacaggtatatctccattttcaaaggtctcaagaatctgacacgtctggatttatcccttaataggctgaagcacatcccaaatgaagcattccttaatttgccagcgagtctcactgaactacatataaatgataatatgttaaagttttttaactggacattactccagcagtttcctcgtctcgagttgcttgacttacgtggaaacaaactactctttttaactgatagcctatctgactttacatcttcccttcggacactgctgctgagtcataacaggatttcccacctaccctctggctttctttctgaagtcagtagtctgaagcacctcgatttaagttccaatctgctaaaaacaatcaacaaatccgcacttgaaactaagaccaccaccaaattatctatgttggaactacacggaaacccctttgaatgcacctgtgacattggagatttccgaagatggatggatgaacatctgaatgtcaaaattcccagactggtagatgtcatttgtgccagtcctggggatcaaagagggaagagtattgtgagtctggagctaacaacttgtgtttcagatgtcact

SEQ ID NO: 4365 - DNA, 2379 bp, Homo Sapiens
ctgggtaccttgcctgccttcctaccctgtgagctccagccccacggcctggtgaactgcaactggctgttcctgaagtctgtgccccacttctccatggcagcaccccgtggcaatgtcaccagcctttccttgtcctccaaccgcatccaccacctccatgattctgactttgcccacctgcccagcctgcggcatctcaacctcaagtggaactgcccgccggttggcctcagccccatgcacttcccctgccacatgaccatcgagcccagcaccttcttggctgtgcccaccctggaagagctaaacctgagctacaacaacatcatgactgtgcctgcgctgcccaaatccctcatatccctgtccctcagccataccaacatcctgatgctagactctgccagcctcgccggcctgcatgccctgcgcttcctattcatggacggcaactgttattacaagaacccctgcaggcaggcactggaggtggccccgggtgccctccttggcctgggcaacctcacccacctgtcactcaagtacaacaacctcactgtggtgccccgcaacctgccttccagcctggagtatctgctgttgtcctacaaccgcatcgtcaaactggcgcctgaggacctggccaatctgaccgccctgcgtgtgctcgatgtgggcggaaattgccgccgctgcgaccacgctcccaacccctgcatggagtgccctcgtcacttcccccagctacatcccgataccttcagccacctgagccgtcttgaaggcctggtgttgaaggacagttctctctcctggctgaatgccagttggttccgtgggctgggaaacctccgagtgctggacctgagtgagaacttcctctacaaatgcatcactaaaaccaaggccttccagggcctaacacagctgcgcaagcttaacctgtccttcaattaccaaaagagggtgtcctttgcccacctgtctctggccccttccttcgggagcctggtcgccctgaaggagctggacatgcacggcatcttcttccgctcactcgatgagaccacgctccggccactggcccgcctgcccatgctccagactctgcgtctgcagatgaacttcatcaaccaggcccagctcggcatcttcagggccttccctggcctgcgctacgtggacctgtcggacaaccgcatcagcggagcttcggagctgacagccaccatgggggaggcagatggaggggagaaggtctggctgcagcctggggaccttgctccggccccagtggacactcccagctctgaagacttcaggcccaactgcagcaccctcaacttcaccttggatctgtcacggaacaacctggtgaccgtgcagccggagatgtttgcccagctctcgcacctgcagtgcctgcgcctgagccacaactgcatctcgcaggcagtcaatggctcccagttcctgccgctgaccggtctgcaggtgctagacctgtcccacaataagctggacctctaccacgagcactcattcacggagctaccacgactggaggccctggacctcagctacaacagccagccctttggcatgcagggcgtgggccacaacttcagcttcgtggctcacctgcgcaccctgcgccacctcagcctggcccacaacaacatccacagccaagtgtcccagcagctctgcagtacgtcgctgcgggccctggacttcagcggcaatgcactgggccatatgtgggccgagggagacctctatctgcacttcttccaaggcctgagcggtttgatctggctggacttgtcccagaaccgcctgcacaccctcctgccccaaaccctgcgcaacctccccaagagcctacaggtgctgcgtctccgtgacaattacctggccttctttaagtggtggagcctccacttcctgcccaaactggaagtcctcgacctggcaggaaaccagctgaaggccctgaccaatggcagcctgcctgctggcacccggctccggaggctggatgtcagctgcaacagcatcagcttcgtggcccccggcttcttttccaaggccaaggagctgcgagagctcaaccttagcgccaacgccctcaagacagtggaccactcctggtttgggcccctggcgagtgccctgcaaatactagatgtaagcgccaaccctctgcactgcgcctgtggggcggcctttatggacttcctgctggaggtgcaggctgccgtgcccggtctgcccagccgggtgaagtgtggcagtccgggccagctccagggcctcagcatctttgcacaggacctgcgcctctgcctggatgaggccctctcctgggactgt

SEQ ID NO: 4366 - DNA, 282 bp, Homo Sapiens
agacatgagattaagaacagctttaagaataattatgaaaaggctttgaagcagtataactctacaggagattatagaagccatgcagtagacaagatccaaaatacgttgcattgttgtggtgtcaccgattatagagattggacagatactaattattactcagaaaaaggatttcctaagagttgctgtaaacttgaagattgtactccacagagagatgcagacaaagtaaacaatgaaggttgttttataaaggtgatgaccattatagagtcagaa

SEQ ID NO: 4367 - DNA, 873 bp, Homo Sapiens
tccaaccagcccccgggtggtggcggcggcagcggcggggactgtcccggcggcaaaggcaagagcatcaactgctcagaattaaatgtgagggagtctgacgtaagagtttgtgatgagtcatcatgtaaatatggaggagtctgtaaagaagatggagatggtttgaaatgtgcatgccaatttcagtgccatacaaattatattcctgtctgtggatcaaatggggacacttatcaaaatgaatgctttctcagaagggctgcttgtaagcaccagaaagagataacagtaatagcaagaggaccatgctactctgataatggatctggatctggagaaggagaagaggaagggtcaggggcagaagttcacagaaaacactccaagtgtggaccctgcaaatataaagctgagtgtgatgaagatgcagaaaatgttgggtgtgtatgtaatatagattgcagtggatacagttttaatcctgtgtgtgcttctgatgggagttcctataacaatccctgttttgttcgagaagcatcttgtataaagcaagaacaaattgatataaggcatcttggtcattgcacagatacagatgacactagtttgttgggaaagaaagatgatggactacaatatcgaccagatgtgaaagatgctagtgatcaaagagaagatgtttatattggaaaccacatgccttgccctgaaaacctcaatggttactgcatccatggaaaatgtgaattcatctattctactcagaaggcttcttgtagatgtgaatctggctacactggacagcactgtgaaaagacagactttagtattctctatgtagtgccaagtaggcaaaagctcactcatgtt

SEQ ID NO: 4368 - DNA, 840 bp, Homo Sapiens
ttccctacctccttaagtgactgccaaacgcccaccggctggaattgctctggttatgatgacagagaaaatgatctcttcctctgtgacaccaacacctgtaaatttgatggggaatgtttaagaattggagacactgtgacttgcgtctgtcagttcaagtgcaacaatgactatgtgcctgtgtgtggctccaatggggagagctaccagaatgagtgttacctgcgacaggctgcatgcaaacagcagagtgagatacttgtggtgtcagaaggatcatgtgccacagatgcaggatcaggatctggagatggagtccatgaaggctctggagaaactagtcaaaaggagacatccacctgtgatatttgccagtttggtgcagaatgtgacgaagatgccgaggatgtctggtgtgtgtgtaatattgactgttctcaaaccaacttcaatcccctctgcgcttctgatgggaaatcttatgataatgcatgccaaatcaaagaagcatcgtgtcagaaacaggagaaaattgaagtcatgtctttgggtcgatgtcaagataacacaactacaactactaagtctgaagatgggcattatgcaagaacagattatgcagagaatgctaacaaattagaagaaagtgccagagaacaccacataccttgtccggaacattacaatggcttctgcatgcatgggaagtgtgagcattctatcaatatgcaggagccatcttgcaggtgtgatgctggttatactggacaacactgtgaaaaaaaggactacagtgttctatacgttgttcccggtcctgtacgatttcagtatgtc

SEQ ID NO: 4369 - DNA, 945 bp, Homo Sapiens
ggggtggccgcaggcctgtatgaactcaatctcaccaccgatagccctgccaccacgggagcggtggtgaccatctcggccagcctggtggccaaggacaacggcagcctggccctgcccgctgacgcccacctctaccgcttccactggatccacaccccgctggtgcttactggcaagatggagaagggtctcagctccaccatccgtgtggtcggccacgtgcccggggaattcccggtctctgtctgggtcactgccgctgactgctggatgtgccagcctgtggccaggggctttgtggtcctccccatcacagagttcctcgtgggggaccttgttgtcacccagaacacttccctaccctggcccagctcctatctcactaagaccgtcctgaaagtctccttcctcctccacgacccgagcaacttcctcaagaccgccttgtttctctacagctgggacttcggggacgggacccagatggtgactgaagactccgtggtctattataactattccatcatcgggaccttcaccgtgaagctcaaagtggtggcggagtgggaagaggtggagccggatgccacgagggctgtgaagcagaagaccggggacttctccgcctcgctgaagctgcaggaaacccttagaggcatccaagtgttggggcccaccctaattcagaccttccaaaagatgaccgtgaccttgaacttcctggggagccctcctctgactgtgtgctggcgtctcaagcctgagtgcctcccgctggaggaaggggagtgccaccctgtgtccgtggccagcacagcgtacaacctgacccacaccttcagggaccctggggactactgcttcagcatccgggccgagaatatcatcagcaagacacatcagtaccacaagatccaggtgtggccctccagaatccagccg

SEQ ID NO: 4370 - DNA, 423 bp, Homo Sapiens
tcccagtactgcggccgccttgaatactggaacccagacaacaagtgctgcagcagctgcctgcaacgcttcgggccgcccccctgcccggactatgagttccgggaaaactgcggactcaatgaccacggcgatttcgtaacgcccccgttccgaaagtgttcttctgggcagtgcaacccagacggcgcggagctatgtagcccctgcggcggcggagccgtgacccctactcccgccgcgggcgggggcagaaccccgtggcgctgcagagagaggccggtccctgccaaggggcactgccccctcacacctggaaacccaggcgcccctagctcccaggagcgcagctcaccagcaagttccattgcctggaggacccctgagcctgtccctcagcaggcctggccgaatttccttccg

SEQ ID NO: 4371 - DNA, 618 bp, Homo Sapiens
gagttggagccacaaatagatggtcagacctgggctgagcgggcacttcgggagaatgaacgccacgccttcacctgccgggtggcaggggggcctggcacccccagattggcctggtatctggatggacagctgcaggaggccagcacctcaagactgctgagcgtgggaggggaggccttctctggaggcaccagcaccttcactgtcactgcccatcgggcccagcatgagctcaactgctctctgcaggaccccagaagtggccgatcagccaacgcctctgtcatccttaatgtgcaattcaagccagagattgcccaagtcggcgccaagtaccaggaagctcagggcccaggcctcctggttgtcctgtttgccctggtgcgtgccaacccgccggccaatgtcacctggatcgaccaggatgggccagtgactgtcaacacctctgacttcctggtgctggatgcgcagaactacccctggctcaccaaccacacggtgcagctgcagctccgcagcctggcacacaacctctcggtggtggccaccaatgacgtgggtgtcaccagtgcgtcgcttccagccccagggcttctggctacccgggtggaa

SEQ ID NO: 4372 - DNA, 1533 bp, Homo Sapiens
ggctacagcgggaagagcgaggtggggctggtgtccgagcacttctcacaggccccgcagaggctgtccttctacagctggtatggcagtgccaggctcttccgcttccgcgtgcccccagatgctgtgcttctacgctggctcctgcaggtctcccgggagagcggcgctgcctgcaccgacgcggagatcaccgtgcacttccgttccggcgcccctccggtcatcaacccgctgggcaccagcttcccggacgacaccgcggtgcagccctccttccaggtcggggtgccgctgagcaccgcaccgagaagcaatgcctccgtcaacgtttcccacccggcccccggggactggttcgtggccgcccacctgcccccctcatcccagaagatcgagttgaagggcttggctcccacctgtgcctacgtcttccagcctgaactgctggtcacgcgggtggtcgagatttccatcatggagccggacgtgccccttcctcagaccctcctctcccatcccagctacctcaaggtctttgtccccgattacacgcgggagcttctgctggagctgcgggactgcgtgtccaatgggagcctgggctgccccgtgcgtctcaccgtgggcccggtcaccctgcctagcaacttccagaaggtgctcacctgcaccggtgccccctggccctgccgcctgctgctgccctcaccgccctgggaccggtggctgcaagtgacagctgagagcctggtggggcccctcgggacagtggctttcagtgctgtagctgccctcacagcttgcaggccacggagcgtgaccgtccagccccttctgcagagcagccaaaaccagagcttcaatgcctcctctggtctgctgtccccgagccccgaccaccaggacctgggcaggagtggcagggtggaccgcagccccttctgcctcacaaactacccagtcacgcgggaggacatggacgtggtgtcggtgcacttccagcccctggacagggtctcggtgagggtgtgttcggacacgccctccgtgatgcggctgcgcctgaacaccggcatggacagcgggggttccctcaccatctccctgcgggccaacaagacagagatgcggaacgagaccgtcgtagtggcctgcgtgaatgctgcctcgcccttccttggcttcaatacttcgctcaactgcaccacagccttcttccagggctaccctttgtctctgagcgcctggtctcgcagggccaacctcatcatcccctacccagagacagacaactggtacctctccctgcagctcatgtgccctgagaatgctgaggactgtgagcaggctgtggtccacgtggagaccaccttgtacctggtgccctgtttgaacgattgtggaccctatggccagtgcctcctgctccgcagacacagctacctgtatgccagctgcagctgcaaggcaggctggcgtgggtggagctgcacggacaacagcacagcccagacggtggcccagcagagg

SEQ ID NO: 4373 - DNA, 588 bp, Homo Sapiens
atccctgagaagctgcaagaagctgtggggaaagttatcatcaatgccacaacctgtactgtcacctgtggccttggctataaggaggagaccgtctgtgaggtgggccctgatggagtgagaaggaaatgtcagactcggcgcttagaatgtctgaccaactggatctgtgggatgctccatttcaccattctcattggcaaggaatttgagcttagctgtctgagttcagacatcttggagtttggacaggaagctttccggttcacctggagacttgctcgaggtgtcatctccactgacgatgaggtcttcaaaccctttcaagccaactcccactttgtgaagtttaaatatgctcaggagtatgactctgggacatatcgctgtgatgtgcagctggtaaaaaacttgagactcgtcaagaggctctattttgggttgagggtccttcctcctaacttggtgaatctgaatttccatcagtcacttactgaggatcagaagttaatagatgagggattggaagttaatctggacagctactccaagcctcaccacccaaagtggaaaaagaaggtggcgtca

SEQ ID NO: 4374 - DNA, 699 bp, Homo Sapiens
atgaacatgccccagtccctgggcaaccagccactgcccccagaaccgccatcccttggaacccctgcggaggggcctgggaccacgtccccacccgagcactgctggccagtgcgcccgactctgcgcaacgagctggacaccttctctgtccacttctacatcttctttggcccaagtgtggcccttccccctgagcgcccagccgtgttcgccatgaggctgttgccagtgctggacagtggaggcgtcctcagcctggagctccagctcaatgcgagctccgtgcgccaggaaaacgtgacggtgtttggatgcttgactcacgaggtgcccttgagcctgggggatgcagcagtgacctgttccaaagagtccctggccggcttcctcctctctgtcagtgccaccaccagggttgccaggctgcgaatcccattcccgcagacggggacctggttcctggccctccgctccctgtgcggggtggggcctcggttcgtgcggtgccgcaacgcgacggccgaggtgtggatgcgcaccttcctgtccccatgcgtggacgactgcgggccctacggccagtgcaagctgctgcgcacacacaattatctgtacgcagcctgcgagtgcaaggccgggtggagaggctggggctgcaccgacagtgcagatgcgctcacctatggattccagctg

SEQ ID NO: 4375 - DNA, 573 bp, Homo Sapiens
gttttaactgtgaatggtaaaactgagaactatatcctggatactacacctggctcccaagcatctctgatatgtgctgttcaaaaccacaccagagaggaagaactgctctggtaccgagaggaggggagagtggatttgaaatctggaaacaaaatcaattccagctctgtctgtgtctcttccatcagtgaaaatgacaacggaatcagctttacctgcaggctggggagggatcagtccgtgtccgtttcggtggtgctgaatgttacttttcctcctctcctaagtggaaacgacttccaaacagttgaggaaggcagtaatgtgaagttggtttgcaatgtgaaagccaacccccaggctcaaatgatgtggtacaaaaacagtagtctcctcgatttagagaaaagccgtcaccaaatccaacagacaagtgagtcttttcagctgtcaatcaccaaagtcgagaagcctgacaacggaacctacagttgtattgcaaagtcatctctgaaaacggagagcttggactttcacctgattgttaaagataaaactgtgggtgtacca

SEQ ID NO: 4376 - DNA, 384 bp, Homo Sapiens
ctgagcgtgcagcaggggcccaacttgctgcaggtgaggcagggcagtcaggcgaccctggtctgccaggtggaccaggccacagcctgggaacggctccgtgttaagtggacaaaggatggggccatcctgtgtcaaccgtacatcaccaacggcagcctcagcctgggggtctgcgggccccagggacggctctcctggcaggcacccagccatctcaccctgcagctggaccctgtgagcctcaaccacagcggggcgtacgtgtgctgggcggccgtagagattcctgagttggaggaggctgagggcaacataacaaggctctttgtggacccagatgaccccacacagaacagaaaccggatcgcaagcttcccagga

SEQ ID NO: 4377 - DNA, 543 bp, Homo Sapiens
gagccaccaacccagaagcccaagaagattgtaaatgccaagaaagatgttgtgaacacaaagatgtttgaggagctcaagagccgtctggacaccctggcccaggaggtggccctgctgaaggagcagcaggccctgcagacggtctgcctgaaggggaccaaggtgcacatgaaatgctttctggccttcacccagacgaagaccttccacgaggccagcgaggactgcatctcgcgcgggggcaccctgagcacccctcagactggctcggagaacgacgccctgtatgagtacctgcgccagagcgtgggcaacgaggccgagatctggctgggcctcaacgacatggcggccgagggcacctgggtggacatgaccggcgcccgcatcgcctacaagaactgggagactgagatcaccgcgcaacccgatggcggcaagaccgagaactgcgcggtcctgtcaggcgcggccaacggcaagtggttcgacaagcgctgccgcgatcagctgccctacatctgccagttcgggatcgtg

SEQ ID NO: 4378 - DNA, 471 bp, Homo Sapiens
gtcagatcatcttctcgaaccccgagtgacaagcctgtagcccatgttgtagcaaaccctcaagctgaggggcagctccagtggctgaaccgccgggccaatgccctcctggccaatggcgtggagctgagagataaccagctggtggtgccatcagagggcctgtacctcatctactcccaggtcctcttcaagggccaaggctgcccctccacccatgtgctcctcacccacaccatcagccgcatcgccgtctcctaccagaccaaggtcaacctcctctctgccatcaagagcccctgccagagggagaccccagagggggctgaggccaagccctggtatgagcccatctatctgggaggggtcttccagctggagaagggtgaccgactcagcgctgagatcaatcggcccgactatctcgactttgccgagtctgggcaggtctactttgggatcattgccctg

SEQ ID NO: 4379 - DNA, 648 bp, Homo Sapiens
gcgagtgggacagaggcagccgcggccacacccagcaaagtgtggggctcttccgcggggaggattgaaccacgaggcgggggccgaggagcgctccctacctccatgggacagcacggacccagtgcccgggcccgggcagggcgcgccccaggacccaggccggcgcgggaagccagccctcggctccgggtccacaagaccttcaagtttgtcgtcgtcggggtcctgctgcaggtcgtacctagctcagctgcaaccatcaaacttcatgatcaatcaattggcacacagcaatgggaacatagccctttgggagagttgtgtccaccaggatctcatagatcagaacatcctggagcctgtaaccggtgcacagagggtgtgggttacaccaatgcttccaacaatttgtttgcttgcctcccatgtacagcttgtaaatcagatgaagaagagagaagtccctgcaccacgaccaggaacacagcatgtcagtgcaaaccaggaactttccggaatgacaattctgctgagatgtgccggaagtgcagcagagggtgccccagagggatggtcaaggtcaaggattgtacgccctggagtgacatcgagtgtgtccacaaagaatcaggcaatggacataat

SEQ ID NO: 4380 - DNA, 465 bp, Homo Sapiens
atcacccaacaagacctagctccccagcagagagcggccccacaacaaaagaggtccagcccctcagagggattgtgtccacctggacaccatatctcagaagacggtagagattgcatctcctgcaaatatggacaggactatagcactcactggaatgacctccttttctgcttgcgctgcaccaggtgtgattcaggtgaagtggagctaagtccctgcaccacgaccagaaacacagtgtgtcagtgcgaagaaggcaccttccgggaagaagattctcctgagatgtgccggaagtgccgcacagggtgtcccagagggatggtcaaggtcggtgattgtacaccctggagtgacatcgaatgtgtccacaaagaatcaggtacaaagcacagtggggaagccccagctgtggaggagacggtgacctccagcccagggactcctgcctctccctgttct

SEQ ID NO: 4381 - DNA, 453 bp, Homo Sapiens
gccaccactgcccggcaggaggaagttccccagcagacagtggccccacagcaacagaggcacagcttcaagggggaggagtgtccagcaggatctcatagatcagaacatactggagcctgtaacccgtgcacagagggtgtggattacaccaacgcttccaacaatgaaccttcttgcttcccatgtacagtttgtaaatcagatcaaaaacataaaagttcctgcaccatgaccagagacacagtgtgtcagtgtaaagaaggcaccttccggaatgaaaactccccagagatgtgccggaagtgtagcaggtgccctagtggggaagtccaagtcagtaattgtacgtcctgggatgatatccagtgtgttgaagaatttggtgccaatgccactgtggaaaccccagctgctgaagagacaatgaacaccagcccggggactcctgcc

SEQ ID NO: 4382 - DNA, 468 bp, Homo Sapiens
gccaccatcccccggcaggacgaagttccccagcagacagtggccccacagcaacagaggcgcagcctcaaggaggaggagtgtccagcaggatctcatagatcagaatatactggagcctgtaacccgtgcacagagggtgtggattacaccattgcttccaacaatttgccttcttgcctgctatgtacagtttgtaaatcaggtcaaacaaataaaagttcctgtaccacgaccagagacaccgtgtgtcagtgtgaaaaaggaagcttccaggataaaaactcccctgagatgtgccggacgtgtagaacagggtgtcccagagggatggtcaaggtcagtaattgtacgccccggagtgacatcaagtgcaaaaatgaatcagctgccagttccactgggaaaaccccagcagcggaggagacagtgaccaccatcctggggatgcttgcctctccctatcac

SEQ ID NO: 4383 - DNA, 549 bp, Homo Sapiens
atcgctcctccatgtaccagtgagaagcattatgagcatctgggacggtgctgtaacaaatgtgaaccaggaaagtacatgtcttctaaatgcactactacctctgacagtgtatgtctgccctgtggcccggatgaatacttggatagctggaatgaagaagataaatgcttgctgcataaagtttgtgatacaggcaaggccctggtggccgtggtcgccggcaacagcacgaccccccggcgctgcgcgtgcacggctgggtaccactggagccaggactgcgagtgctgccgccgcaacaccgagtgcgcgccgggcctgggcgcccagcacccgttgcagctcaacaaggacacagtgtgcaaaccttgccttgcaggctacttctctgatgccttttcctccacggacaaatgcagaccctggaccaactgtaccttccttggaaagagagtagaacatcatgggacagagaaatccgatgcggtttgcagttcttctctgccagctagaaaaccaccaaatgaaccccatgtttacttgccc

SEQ ID NO: 4384 - DNA, 1140 bp, Homo Sapiens
gaaacgtttcctccaaagtaccttcattatgacgaagaaacctctcatcagctgttgtgtgacaaatgtcctcctggtacctacctaaaacaacactgtacagcaaagtggaagaccgtgtgcgccccttgccctgaccactactacacagacagctggcacaccagtgacgagtgtctatactgcagccccgtgtgcaaggagctgcagtacgtcaagcaggagtgcaatcgcacccacaaccgcgtgtgcgaatgcaaggaagggcgctaccttgagatagagttctgcttgaaacataggagctgccctcctggatttggagtggtgcaagctggaaccccagagcgaaatacagtttgcaaaagatgtccagatgggttcttctcaaatgagacgtcatctaaagcaccctgtagaaaacacacaaattgcagtgtctttggtctcctgctaactcagaaaggaaatgcaacacacgacaacatatgttccggaaacagtgaatcaactcaaaaatgtggaatagatgttaccctgtgtgaggaggcattcttcaggtttgctgttcctacaaagtttacgcctaactggcttagtgtcttggtagacaatttgcctggcaccaaagtaaacgcagagagtgtagagaggataaaacggcaacacagctcacaagaacagactttccagctgctgaagttatggaaacatcaaaacaaagaccaagatatagtcaagaagatcatccaagatattgacctctgtgaaaacagcgtgcagcggcacattggacatgctaacctcaccttcgagcagcttcgtagcttgatggaaagcttaccgggaaagaaagtgggagcagaagacattgaaaaaacaataaaggcatgcaaacccagtgaccagatcctgaagctgctcagtttgtggcgaataaaaaatggcgaccaagacaccttgaagggcctaatgcacgcactaaagcactcaaagacgtaccactttcccaaaactgtcactcagagtctaaagaagaccatcaggttccttcacagcttcacaatgtacaaattgtatcagaagttatttttagaaatgataggtaaccaggtccaatcagtaaaaataagctgctta

SEQ ID NO: 4385 - DNA, 159 bp, Homo Sapiens
gagcaagcgccaggcaccgccccctgctcccgcggcagctcctggagcgcggacctggacaagtgcatggactgcgcgtcttgcagggcgcgaccgcacagcgacttctgcctgggctgcgctgcagcacctcctgcccccttccggctgctttggccc

SEQ ID NO: 4386 - DNA, 357 bp, Homo Sapiens
atgagtggcctgggccggagcaggcgaggtggccggagccgtgtggaccaggaggagcgctggtcactcagctgccgcaaggagcaaggcaagttctatgaccatctcctgagggactgcatcagctgtgcctccatctgtggacagcaccctaagcaatgtgcatacttctgtgagaacaagctcaggagcccagtgaaccttccaccagagctcaggagacagcggagtggagaagttgaaaacaattcagacaactcgggaaggtaccaaggattggagcacagaggctcagaagcaagtccagctctcccggggctgaagctgagtgcagatcaggtggccctggtctacagc

SEQ ID NO: 4387 - DNA, 234 bp, Homo Sapiens
atgaggcgagggccccggagcctgcggggcagggacgcgccagcccccacgccctgcgtcccggccgagtgcttcgacctgctggtccgccactgcgtggcctgcgggctcctgcgcacgccgcggccgaaaccggccggggccagcagccctgcgcccaggacggcgctgcagccgcaggagtcggtgggcgcgggggccggcgaggcggcgctgcccctgcccgggctgctc

SEQ ID NO: 4388 - DNA, 492 bp, Homo Sapiens
ctgccgtcctgcaaggaggacgagtacccagtgggctccgagtgctgccccaagtgcagtccaggttatcgtgtgaaggaggcctgcggggagctgacgggcacagtgtgtgaaccctgccctccaggcacctacattgcccacctcaatggcctaagcaagtgtctgcagtgccaaatgtgtgacccagccatgggcctgcgcgcgagccggaactgctccaggacagagaacgccgtgtgtggctgcagcccaggccacttctgcatcgtccaggacggggaccactgcgccgcgtgccgcgcttacgccacctccagcccgggccagagggtgcagaagggaggcaccgagagtcaggacaccctgtgtcagaactgccccccggggaccttgtctcccaatgggaccctggaggaatgtcagcaccagaccaagtgcagctggctggtgacgaaggccggagctgggaccagcagctcccactgggta

SEQ ID NO: 4389 - DNA, 162 bp, Homo Sapiens
atgttgcagatggctgggcagtgctcccaaaatgaatattttgacagtttgttgcatgcttgcataccttgtcaacttcgatgttcttctaatactcctcctctaacatgtcagcgttattgtaatgcaagtgtgaccaattcagtgaaaggaacgaatgcg

SEQ ID NO: 4390 - DNA, 423 bp, Homo Sapiens
gaatcaggagactgtagacagcaagaattcagggatcggtctggaaactgtgttccctgcaaccagtgtgggccaggcatggagttgtctaaggaatgtggcttcggctatggggaggatgcacagtgtgtgacgtgccggctgcacaggttcaaggaggactggggcttccagaaatgcaagccctgtctggactgcgcagtggtgaaccgctttcagaaggcaaattgttcagccaccagtgatgccatctgcggggactgcttgccaggattttataggaagacgaaacttgtcggctttcaagacatggagtgtgtgccttgtggagaccctcctcctccttacgaaccgcactgtgccagcaaggtcaacctcgtgaagatcgcgtccacggcctccagcccacgggacacggcgctg

SEQ ID NO: 4391 - DNA, 411 bp, Homo Sapiens
tcaacaaccctttggcagtgcccacctggggaggagcccgacctggacccagggcagggcacattatgcaggccctgccccccaggcaccttctcagctgcatggggctccagcccatgccagccccatgcccgttgcagcctttggaggaggctggaggcccaggtgggcatggcaactcgagatacactctgtggagactgctggcctgggtggtttgggccttggggggttccccgcgttccatgtcaaccatgttcctgggcacctctgggtactcatggctgtgatgagtgggggcggcgggcccgacgtggcgtggaggtggcagcaggggccagcagcggtggtgagacacggcagcctgggaacggcacccgggcaggtggcccagaggagacagccgcccag

SEQ ID NO: 4392 - DNA, 483 bp, Homo Sapiens
gatagtgtgtgtccccaaggaaaatatatccaccctcaaaataattcgatttgctgtaccaagtgccacaaaggaacctacttgtacaatgactgtccaggcccggggcaggatacggactgcagggagtgtgagagcggctccttcaccgcttcagaaaaccacctcagacactgcctcagctgctccaaatgccgaaaggaaatgggtcaggtggagatctcttcttgcacagtggaccgggacaccgtgtgtggctgcaggaagaaccagtaccggcattattggagtgaaaaccttttccagtgcttcaattgcagcctctgcctcaatgggaccgtgcacctctcctgccaggagaaacagaacaccgtgtgcacctgccatgcaggtttctttctaagagaaaacgagtgtgtctcctgtagtaactgtaagaaaagcctggagtgcacgaagttgtgcctaccccagattgagaat

SEQ ID NO: 4393 - DNA, 705 bp, Homo Sapiens
ttgcccgcccaggtggcatttacaccctacgccccggagcccgggagcacatgccggctcagagaatactatgaccagacagctcagatgtgctgcagcaaatgctcgccgggccaacatgcaaaagtcttctgtaccaagacctcggacaccgtgtgtgactcctgtgaggacagcacatacacccagctctggaactgggttcccgagtgcttgagctgtggctcccgctgtagctctgaccaggtggaaactcaagcctgcactcgggaacagaaccgcatctgcacctgcaggcccggctggtactgcgcgctgagcaagcaggaggggtgccggctgtgcgcgccgctgcgcaagtgccgcccgggcttcggcgtggccagaccaggaactgaaacatcagacgtggtgtgcaagccctgtgccccggggacgttctccaacacgacttcatccacggatatttgcaggccccaccagatctgtaacgtggtggccatccctgggaatgcaagcatggatgcagtctgcacgtccacgtcccccacccggagtatggccccaggggcagtacacttaccccagccagtgtccacacgatcccaacacacgcagccaactccagaacccagcactgctccaagcacctccttcctgctcccaatgggccccagccccccagctgaagggagcactggcgac

SEQ ID NO: 4394 - DNA, 924 bp, Homo Sapiens
cagccagaacagaaggcctcgaatctcattggcacataccgccatgttgaccgtgccaccggccaggtgctaacctgtgacaagtgtccagcaggaacctatgtctctgagcattgtaccaacacaagcctgcgcgtctgcagcagttgccctgtggggacctttaccaggcatgagaatggcatagagaaatgccatgactgtagtcagccatgcccatggccaatgattgagaaattaccttgtgctgccttgactgaccgagaatgcacttgcccacctggcatgttccagtctaacgctacctgtgccccccatacggtgtgtcctgtgggttggggtgtgcggaagaaagggacagagactgaggatgtgcggtgtaagcagtgtgctcggggtaccttctcagatgtgccttctagtgtgatgaaatgcaaagcatacacagactgtctgagtcagaacctggtggtgatcaagccggggaccaaggagacagacaacgtctgtggcacactcccgtccttctccagctccacctcaccttcccctggcacagccatctttccacgccctgagcacatggaaacccatgaagtcccttcctccacttatgttcccaaaggcatgaactcaacagaatccaactcttctgcctctgttagaccaaaggtactgagtagcatccaggaagggacagtccctgacaacacaagctcagcaagggggaaggaagacgtgaacaagaccctcccaaaccttcaggtagtcaaccaccagcaaggcccccaccacagacacatcctgaagctgctgccgtccatggaggccactgggggcgagaagtccagcacgcccatcaagggccccaagaggggacatcctagacagaacctacacaagcattttgacatcaatgagcat

SEQ ID NO: 4395 - DNA, 525 bp, Homo Sapiens
cagggcggcactcgtagccccaggtgtgactgtgccggtgacttccacaagaagattggtctgttttgttgcagaggctgcccagcggggcactacctgaaggccccttgcacggagccctgcggcaactccacctgccttgtgtgtccccaagacaccttcttggcctgggagaaccaccataattctgaatgtgcccgctgccaggcctgtgatgagcaggcctcccaggtggcgctggagaactgttcagcagtggccgacacccgctgtggctgtaagccaggctggtttgtggagtgccaggtcagccaatgtgtcagcagttcacccttctactgccaaccatgcctagactgcggggccctgcaccgccacacacggctactctgttcccgcagagatactgactgtgggacctgcctgcctggcttctatgaacatggcgatggctgcgtgtcctgccccacgagcaccctggggagctgtccagagcgctgtgccgctgtctgtggctggaggcag

SEQ ID NO: 4396 - DNA, 558 bp, Homo Sapiens
ctccactgtgtcggggacacctaccccagcaacgaccggtgctgccacgagtgcaggccaggcaacgggatggtgagccgctgcagccgctcccagaacacggtgtgccgtccgtgcgggccgggcttctacaacgacgtggtcagctccaagccgtgcaagccctgcacgtggtgtaacctcagaagtgggagtgagcggaagcagctgtgcacggccacacaggacacagtctgccgctgccgggcgggcacccagcccctggacagctacaagcctggagttgactgtgccccctgccctccagggcacttctccccaggcgacaaccaggcctgcaagccctggaccaactgcaccttggctgggaagcacaccctgcagccggccagcaatagctcggacgcaatctgtgaggacagggaccccccagccacgcagccccaggagacccagggccccccggccaggcccatcactgtccagcccactgaagcctggcccagaacctcacagggaccctccacccggcccgtggaggtccccgggggccgtgcg

SEQ ID NO: 4397 - DNA, 519 bp, Homo Sapiens
gaaccacccactgcatgcagagaaaaacagtacctaataaacagtcagtgctgttctttgtgccagccaggacagaaactggtgagtgactgcacagagttcactgaaacggaatgccttccttgcggtgaaagcgaattcctagacacctggaacagagagacacactgccaccagcacaaatactgcgaccccaacctagggcttcgggtccagcagaagggcacctcagaaacagacaccatctgcacctgtgaagaaggctggcactgtacgagtgaggcctgtgagagctgtgtcctgcaccgctcatgctcgcccggctttggggtcaagcagattgctacaggggtttctgataccatctgcgagccctgcccagtcggcttcttctccaatgtgtcatctgctttcgaaaaatgtcacccttggacaagctgtgagaccaaagacctggttgtgcaacaggcaggcacaaacaagactgatgttgtctgtggtccccaggatcggctgaga

SEQ ID NO: 4398 - DNA, 444 bp, Homo Sapiens
caagtgactgacatcaactccaagggattggaattgaggaagactgttactacagttgagactcagaacttggaaggcctgcatcatgatggccaattctgccataagccctgtcctccaggtgaaaggaaagctagggactgcacagtcaatggggatgaaccagactgcgtgccctgccaagaagggaaggagtacacagacaaagcccatttttcttccaaatgcagaagatgtagattgtgtgatgaaggacatggcttagaagtggaaataaactgcacccggacccagaataccaagtgcagatgtaaaccaaactttttttgtaactctactgtatgtgaacactgtgacccttgcaccaaatgtgaacatggaatcatcaaggaatgcacactcaccagcaacaccaagtgcaaagaggaaggatccagatctaac

SEQ ID NO: 4399 - DNA, 813 bp, Homo Sapiens
gtggcagaaacacccacctacccctggcgggacgcagagacaggggagcggctggtgtgcgcccagtgccccccaggcacctttgtgcagcggccgtgccgccgagacagccccacgacgtgtggcccgtgtccaccgcgccactacacgcagttctggaactacctggagcgctgccgctactgcaacgtcctctgcggggagcgtgaggaggaggcacgggcttgccacgccacccacaaccgtgcctgccgctgccgcaccggcttcttcgcgcacgctggtttctgcttggagcacgcatcgtgtccacctggtgccggcgtgattgccccgggcacccccagccagaacacgcagtgccagccgtgccccccaggcaccttctcagccagcagctccagctcagagcagtgccagccccaccgcaactgcacggccctgggcctggccctcaatgtgccaggctcttcctcccatgacaccctgtgcaccagctgcactggcttccccctcagcaccagggtaccaggagctgaggagtgtgagcgtgccgtcatcgactttgtggctttccaggacatctccatcaagaggctgcagcggctgctgcaggccctcgaggccccggagggctggggtccgacaccaagggcgggccgcgcggccttgcagctgaagctgcgtcggcggctcacggagctcctgggggcgcaggacggggcgctgctggtgcggctgctgcaggcgctgcgcgtggccaggatgcccgggctggagcggagcgtccgtgagcgcttcctccctgtgcac

SEQ ID NO: 4400 - DNA, 516 bp, Homo Sapiens
gctactccagcccccaagagctgcccagagaggcactactgggctcagggaaagctgtgctgccagatgtgtgagccaggaacattcctcgtgaaggactgtgaccagcatagaaaggctgctcagtgtgatccttgcataccgggggtctccttctctcctgaccaccacacccggccccactgtgagagctgtcggcactgtaactctggtcttctcgttcgcaactgcaccatcactgccaatgctgagtgtgcctgtcgcaatggctggcagtgcagggacaaggagtgcaccgagtgtgatcctcttccaaacccttcgctgaccgctcggtcgtctcaggccctgagcccacaccctcagcccacccacttaccttatgtcagtgagatgctggaggccaggacagctgggcacatgcagactctggctgacttcaggcagctgcctgcccggactctctctacccactggccaccccaaagatccctgtgcagctccgattttattcgc

SEQ ID NO: 4401 - DNA, 1083 bp, Homo Sapiens
tttccgcaggaccgtccattcgaggatacttgtcacgggaatccatcacactactacgataaagcggtacgtaggtgttgttaccgttgccccatgggtttatttcctacccagcaatgcccccaacgtccaacagactgcagaaaacaatgtgagccagattactacttagatgaagcagaccgttgcaccgcctgtgtaacctgtagccgtgatgacctagtggagaagaccccctgcgcgtggaactcctcacgtgtctgcgaatgcagacccggaatgttttgctcaacatccgcggttaactcttgtgcaagatgcttcttccatagtgtatgtcccgccggcatgattgttaagtttccgggaactgcgcaaaagaacacagtttgcgaaccagccagtccgggggtgtctccagcttgcgcttcaccagaaaattgcaaagagccctcttcaggcacgataccccaggcaaaacctactcctgtctccccagcaaccagcagcgcctcaactatgcccgtcaggggtggtacaagactggcccaggaagcagcttccaagttaactagagccccggacagccccagcagtgtgggtagaccgtcaagcgatccgggattgtccccgacccagccgtgtcccgagggcagcggtgattgccgtaagcagtgcgagcctgattactaccttgatgaagcagggcgttgtacggcttgcgtgtcatgctcaagggatgaccttgttgaaaagacgccctgcgcttggaatagttcacgtacatgcgagtgcagacctggcatgatatgcgcaaccagcgcaacaaactcatgtgcgaggtgtgtgccttatccgatctgcgcagcagaaaccgtcaccaaaccacaggacatggctgaaaaggacacaacattcgaagcgccacccttaggaactcagccggactgcaacccaacgcctgagaatggagaagcaccagctagtacatcaccgacacaaagtcttttggtcgactcccaagcgagtaagacgctgcctatacccacctccgctcccgttgccctgtccagtactggtaag

SEQ ID NO: 4402 - DNA, 489 bp, Homo Sapiens
ttgcaggatccttgtagtaactgcccagctggtacattctgtgataataacaggaatcagatttgcagtccctgtcctccaaatagtttctccagcgcaggtggacaaaggacctgtgacatatgcaggcagtgtaaaggtgttttcaggaccaggaaggagtgttcctccaccagcaatgcagagtgtgactgcactccagggtttcactgcctgggggcaggatgcagcatgtgtgaacaggattgtaaacaaggtcaagaactgacaaaaaaaggttgtaaagactgttgctttgggacatttaacgatcagaaacgtggcatctgtcgaccctggacaaactgttctttggatggaaagtctgtgcttgtgaatgggacgaaggagagggacgtggtctgtggaccatctccagccgacctctctccgggagcatcctctgtgaccccgcctgcccctgcgagagagccaggacactctccgcag

SEQ ID NO: 4403 - DNA, 729 bp, Homo Sapiens
accaacgagctgaagcagatgcaggacaagtactccaaaagtggcattgcttgtttcttaaaagaagatgacagttattgggaccccaatgacgaagagagtatgaacagcccctgctggcaagtcaagtggcaactccgtcagctcgttagaaagatgattttgagaacctctgaggaaaccatttctacagttcaagaaaagcaacaaaatatttctcccctagtgagagaaagaggtcctcagagagtagcagctcacataactgggaccagaggaagaagcaacacattgtcttctccaaactccaagaatgaaaaggctctgggccgcaaaataaactcctgggaatcatcaaggagtgggcattcattcctgagcaacttgcacttgaggaatggtgaactggtcatccatgaaaaagggttttactacatctattcccaaacatactttcgatttcaggaggaaataaaagaaaacacaaagaacgacaaacaaatggtccaatatatttacaaatacacaagttatcctgaccctatattgttgatgaaaagtgctagaaatagttgttggtctaaagatgcagaatatggactctattccatctatcaagggggaatatttgagcttaaggaaaatgacagaatttttgtttctgtaacaaatgagcacttgatagacatggaccatgaagccagttttttcggggcctttttagttggc

SEQ ID NO: 4404 - DNA, 534 bp, Homo Sapiens
atcagagcagagaaagcgatggtggatggctcatggttagatctggccaagaggagcaagcttgaagctcagccttttgctcatctcactattaatgccaccgacatcccatctggttcccataaagtgagtctgtcctcttggtaccatgatcggggttgggccaagatctccaacatgacttttagcaatggaaaactaatagttaatcaggatggcttttattacctgtatgccaacatttgctttcgacatcatgaaacttcaggagacctagctacagagtatcttcaactaatggtgtacgtcactaaaaccagcatcaaaatcccaagttctcataccctgatgaaaggaggaagcaccaagtattggtcagggaattctgaattccatttttattccataaacgttggtggattttttaagttacggtctggagaggaaatcagcatcgaggtctccaacccctccttactggatccggatcaggatgcaacatactttggggcttttaaagttcgagatatagat

SEQ ID NO: 4405 - DNA, 468 bp, Homo Sapiens
agtgcacctaaaggccggaaaacacgggctcgaagagcgatcgcagcccattatgaagttcatccacgacctggacaggacggagcgcaggcaggtgtggacgggacagtgagtggctgggaggaagccagaatcaacagctccagccctctgcgctacaaccgccagatcggggagtttatagtcacccgggctgggctctactacctgtactgtcaggtgcactttgatgaggggaaggctgtctacctgaagctggacttgctggtggatggtgtgctggccctgcgctgcctggaggaattctcagccactgcggcgagttccctcgggccccagctccgcctctgccaggtgtctgggctgttggccctgcggccagggtcctccctgcggatccgcaccctcccctgggcccatctcaaggctgcccccttcctcacctacttcggactcttccaggttcac

SEQ ID NO: 4406 - DNA, 438 bp, Homo Sapiens
gcagtgctcacccaaaaacagaagaagcagcactctgtcctgcacctggttcccattaacgccacctccaaggatgactccgatgtgacagaggtgatgtggcaaccagctcttaggcgtgggagaggcctacaggcccaaggatatggtgtccgaatccaggatgctggagtttatctgctgtatagccaggtcctgtttcaagacgtgactttcaccatgggtcaggtggtgtctcgagaaggccaaggaaggcaggagactctattccgatgtataagaagtatgccctcccacccggaccgggcctacaacagctgctatagcgcaggtgtcttccatttacaccaaggggatattctgagtgtcataattccccgggcaagggcgaaacttaacctctctccacatggaaccttcctggggtttgtgaaactg

SEQ ID NO: 4407 - DNA, 456 bp, Homo Sapiens
gccgttcagggtccagaagaaacagtcactcaagactgcttgcaactgattgcagacagtgaaacaccaactatacaaaaaggatcttacacatttgttccatggcttctcagctttaaaaggggaagtgccctagaagaaaaagagaataaaatattggtcaaagaaactggttacttttttatatatggtcaggttttatatactgataagacctacgccatgggacatctaattcagaggaagaaggtccatgtctttggggatgaattgagtctggtgactttgtttcgatgtattcaaaatatgcctgaaacactacccaataattcctgctattcagctggcattgcaaaactggaagaaggagatgaactccaacttgcaataccaagagaaaatgcacaaatatcactggatggagatgtcacattttttggtgcattgaaactgctg

SEQ ID NO: 4408 - DNA, 468 bp, Homo Sapiens
caagagcgaaggtctcacgaggtcaacccagcagcgcatctcacaggggccaactccagcttgaccggcagcggggggccgctgttatgggagactcagctgggcctggccttcctgaggggcctcagctaccacgatggggcccttgtggtcaccaaagctggctactactacatctactccaaggtgcagctgggcggtgtgggctgcccgctgggcctggccagcaccatcacccacggcctctacaagcgcacaccccgctaccccgaggagctggagctgttggtcagccagcagtcaccctgcggacgggccaccagcagctcccgggtctggtgggacagcagcttcctgggtggtgtggtacacctggaggctggggagaaggtggtcgtccgtgtgctggatgaacgcctggttcgactgcgtgatggtacccggtcttacttcggggctttcatggtg

SEQ ID NO: 4409 - DNA, 540 bp, Homo Sapiens
ctaaaaggacaggagtttgcaccttcacatcagcaagtttatgcacctcttagagcagacggagataagccaagggcacacctgacagttgtgagacaaactcccacacagcactttaaaaatcagttcccagctctgcactgggaacatgaactaggcctggccttcaccaagaaccgaatgaactataccaacaaattcctgctgatcccagagtcgggagactacttcatttactcccaggtcacattccgtgggatgacctctgagtgcagtgaaatcagacaagcaggccgaccaaacaagccagactccatcactgtggtcatcaccaaggtaacagacagctaccctgagccaacccagctcctcatggggaccaagtctgtgtgcgaagtaggtagcaactggttccagcccatctacctcggagccatgttctccttgcaagaaggggacaagctaatggtgaacgtcagtgacatctctttggtggattacacaaaagaagataaaaccttctttggagccttcttacta

SEQ ID NO: 4410 - DNA, 384 bp, Homo Sapiens
caattagagactgctaaggagccctgtatggctaagtttggaccattaccctcaaaatggcaaatggcatcttctgaacctccttgcgtgaataaggtgtctgactggaagctggagatacttcagaatggcttatatttaatttatggccaagtggctcccaatgcaaactacaatgatgtagctccttttgaggtgcggctgtataaaaacaaagacatgatacaaactctaacaaacaaatctaaaatccaaaatgtaggagggacttatgaattgcatgttggggacaccatagacttgatattcaactctgagcatcaggttctaaaaaataatacatactggggtatcattttactagcaaatccccaattcatctcc

SEQ ID NO: 4411 - DNA, 399 bp, Homo Sapiens
atggtatcacatcggtatcctcgaattcaaagtatcaaagtacaatttaccgaatataagaaggagaaaggtttcatcctcacttcccaaaaggaggatgaaatcatgaaggtgcagaacaactcagtcatcatcaactgtgatgggttttatctcatctccctgaagggctacttctcccaggaagtcaacattagccttcattaccagaaggatgaggagcccctcttccaactgaagaaggtcaggtctgtcaactccttgatggtggcctctctgacttacaaagacaaagtctacttgaatgtgaccactgacaatacctccctggatgacttccatgtgaatggcggagaactgattcttatccatcaaaatcctggtgaattctgtgtcctt

SEQ ID NO: 4412 - DNA, 456 bp, Homo Sapiens
caaataggccaccccagtccaccccctgaaaaaaaggagctgaggaaagtggcccatttaacaggcaagtccaactcaaggtccatgcctctggaatgggaagacacctatggaattgtcctgctttctggagtgaagtataagaagggtggccttgtgatcaatgaaactgggctgtactttgtatattccaaagtatacttccggggtcaatcttgcaacaacctgcccctgagccacaaggtctacatgaggaactctaagtatccccaggatctggtgatgatggaggggaagatgatgagctactgcactactgggcagatgtgggcccgcagcagctacctgggggcagtgttcaatcttaccagtgctgatcatttatatgtcaacgtatctgagctctctctggtcaattttgaggaatctcagacgtttttcggcttatataagctc

SEQ ID NO: 4413 - DNA, 516 bp, Homo Sapiens
cagaggacggactccattcccaactcacctgacaacgtccccctcaaaggaggaaattgctcagaagacctcttatgtatcctgaaaagggctccattcaagaagtcatgggcctacctccaagtggcaaagcatctaaacaaaaccaagttgtcttggaacaaagatggcattctccatggagtcagatatcaggatgggaatctggtgatccaattccctggtttgtacttcatcatttgccaactgcagtttcttgtacaatgcccaaataattctgtcgatctgaagttggagcttctcatcaacaagcatatcaaaaaacaggccctggtgacagtgtgtgagtctggaatgcaaacgaaacacgtataccagaatctctctcaattcttgctggattacctgcaggtcaacaccaccatatcagtcaatgtggatacattccagtacatagatacaagcacctttcctcttgagaatgtgttgtccatcttcttatacagtaattcagac

SEQ ID NO: 4414 - DNA, 615 bp, Homo Sapiens
gcctgcccctgggccgtgtccggggctcgcgcctcgcccggctccgcggccagcccgagactccgcgagggtcccgagctttcgcccgacgatcccgccggcctcttggacctgcggcagggcatgtttgcgcagctggtggcccaaaatgttctgctgatcgatgggcccctgagctggtacagtgacccaggcctggcaggcgtgtccctgacggggggcctgagctacaaagaggacacgaaggagctggtggtggccaaggctggagtctactatgtcttctttcaactagagctgcggcgcgtggtggccggcgagggctcaggctccgtttcacttgcgctgcacctgcagccactgcgctctgctgctggggccgccgccctggctttgaccgtggacctgccacccgcctcctccgaggctcggaactcggccttcggtttccagggccgcttgctgcacctgagtgccggccagcgcctgggcgtccatcttcacactgaggccagggcacgccatgcctggcagcttacccagggcgccacagtcttgggactcttccgggtgacccccgaaatcccagccggactcccttcaccgaggtcggaa

SEQ ID NO: 4415 - DNA, 3813 bp, Homo Sapiens
gagcctcccggctgcagcaacaaggagcaacaggtcactgtcagccacacctacaagatcgatgtgcccaagtctgccttggttcaggttgacgctgaccctcagcccctcagtgacgatggggcttcgctcttggccctgggggaggccagggaggaacagaacatcatcttcaggcacaacatccgccttcagacgccacagaaggactgcgagttggcaggcagtgtccaggacctcctggcccgggtgaagaagctggaggaagagatggtggagatgaaggaacagtgtagtgcccagcgctgctgccagggagtcactgatctaagccgccactgcagcggccacgggaccttctccctggagacctgcagctgccactgcgaagagggcagggagggccccgcctgcgagcggctggcctgccccggggcgtgcagcggccacgggcgttgcgtggacgggcgctgcctgtgccatgagccctacgtgggtgccgactgcggctacccggcctgccctgagaactgcagcggacacggcgagtgcgtgcgcggcgtgtgccagtgccacgaagacttcatgtcggaggactgcagcgagaagcgctgtcccggcgactgcagcggccacggcttctgtgacacgggcgagtgctactgcgaggagggcttcacaggcctggactgtgcccaggtggtcaccccacagggcctgcagctgctcaagaacacggaggattctctgctggtgagctgggagccctccagccaggtggatcactacctcctcagctactaccccctggggaaggagctctctgggaagcagatccaagtgcccaaggagcagcacagctatgagattcttggtttgctgcctggaaccaagtacatagtcaccctgcgtaacgtcaagaatgaagtttctagcagcccacagcatctacttgccaccacagaccttgctgtgcttggcactgcctgggtgacagatgagactgagaactcccttgacgtggagtgggaaaacccctcaactgaggtggactactacaagctgcgatatggccccatgacaggacaggaggtagctgaggtcactgtgcccaagagtagtgaccccaagagccgatatgacatcactggtctgcacccggggactgagtataagatcacggtggtgcccatgagaggagagctggagggcaagccgatcctcctgaatggcaggacagaaattgacagtccaaccaatgttgtcactgatcgagtgactgaagacacagcaactgtctcctgggacccagtgcaggctgtcatagacaagtatgtagtgcgctacacttctgctgatggggacaccaaggaaatggcagtgcacaaggatgagagcagcactgtcctgacgggcctgaagccaggagaggcatacaaggtctacgtgtgggctgaaaggggcaaccaggggagcaagaaagctgacaccaatgccctcacagaaattgacagcccagcaaacctggtgactgaccgggtgactgagaataccgccaccatctcctgggacccggtacaggccaccattgacaagtacgtggtgcgctacacctctgctgacgaccaagagaccagagaggttctggtggggaaggagcagagcagcactgtcctgacaggcctgaggccaggtgtggagtacacagtgcatgtctgggcccagaagggggaccgagagagcaagaaggctgacaccaacgccccgacagatattgacagccccaaaaacctggtgactgaccgggtgacagagaatatggccacggtctcctgggacccggtgcaggccgccattgacaagtacgtggtgcgctacacctctgctggtggagagaccagggaggttccggtggggaaggagcagagcagcacagtcctgacaggcctgagaccgggtatggagtacatggtgcacgtgtgggcccagaagggggaccaggagagcaagaaggccgacaccaaggcccagacagacattgacagcccccaaaacctggtgaccgaccgggtgacagagaatatggccactgtctcctgggacccggtgcgggccaccattgacaggtatgtggtgcgctacacctctgccaaggacggagagaccagggaggttccggtggggaaggagcagagtagcactgtcctgacgggcctgaggccgggtgtggagtacacggtgcacgtgtgggcccagaagggggcccaggagagcaagaaggctgacaccaaggcccagacagacattgacagcccccaaaacctggtcactgactgggtgacagagaatacagccactgtctcctgggacccggtgcaggccaccattgacaggtatgtggtgcactacacgtctgccaacggagagaccagggaggttccagtggggaaggagcagagcagcactgtcctgacgggcctgaggccgggcatggagtacacggtgcacgtgtgggcccagaaggggaaccaggagagcaagaaggctgacaccaaggcccagacagaaattgacggccccaaaaacctagtgactgactgggtgacggagaatatggccactgtctcctgggacccggttcaggccaccattgacaagtacatggtgcgctacacctctgctgacggagagaccagggaggttccggtggggaaggagcacagcagcactgtcctgacgggcctgagaccaggcatggagtacatggtgcacgtgtgggcccagaagggggcccaggagagcaagaaggctgacaccaaggcccagacagaactcgaccctcccagaaaccttcgtccatctgctgtaacgcagtctggtggcatattgacctggacgcccccctctgctcagatccacggctacattctgacttaccagttcccagatggcacagttaaggagatgcagctgggacgggaagaccagaggtttgcgttgcaaggccttgagcaaggcgccacctaccctgtctcccttgttgcctttaagggtggtcgccggagcagaaatgtatccaccaccctctccacagttggtgcccgtttcccacacccttcggactgcagtcaggttcagcagaacagcaatgccgccagtggtctgtacaccatctacctgcatggcgatgccagccggcccctgcaggtgtactgtgacatggaaacggacggaggtggctggattgtcttccagaggcggaacactgggcagctggatttcttcaagcgatggaggagctatgtggaaggctttggggaccccatgaaggagttctggcttggacttgacaagctacacaacctcaccaccggcactccagcgcggtatgaggtgagagtggatttacagactgccaatgaatctgcctatgctatatatgatttcttccaagtggcctccagcaaggagcggtataagctgacagttgggaaatacagaggcacggcaggggatgctcttacttaccacaatggatggaagtttacaacttttgacagagacaacgatatcgcactcagcaactgtgccctgacacatcatggtggctggtggtataagaactgccacttggccaaccctaatggcagatatggggagaccaagcacagtgagggggtgaactgggagccttggaaaggacatgaattctccattccttacgtggagttgaaaatccgccctcatggctacagcagggagcctgtcctgggcagaaagaagcggacgctgagaggaaggctgcgaacgttc

SEQ ID NO: 4416 - DNA, 3513 bp, Homo Sapiens
tgcatctgcaacgaaggctggtttggcaagaattgctcggagccctactgcccgctgggttgctccagccggggggtgtgtgtggatggccagtgcatctgtgacagcgagtacagcggggatgactgttccgaactccggtgcccaacagactgcagctcccgggggctctgcgtggacggggagtgtgtctgtgaagagccctacactggcgaggactgcagggaactgaggtgccctggggactgttcggggaaggggagatgtgccaacggtacctgtttatgcgaggagggctacgttggtgaggactgcggccagcggcagtgtctgaatgcctgcagtgggcgaggacaatgtgaggaggggctctgcgtctgtgaagagggctaccagggccctgactgctcagcagttgcccctccagaggacttgcgagtggctggtatcagcgacaggtccattgagctggaatgggacgggccgatggcagtgacggaatatgtgatctcttaccagccgacggccctggggggcctccagctccagcagcgggtgcctggagattggagtggtgtcaccatcacggagctggagccaggtctcacctacaacatcagcgtctacgctgtcattagcaacatcctcagccttcccatcactgccaaggtggccacccatctctccactcctcaagggctacaatttaagacgatcacagagaccaccgtggaggtgcagtgggagcccttctcattttccttcgatgggtgggaaatcagcttcattccaaagaacaatgaagggggagtgattgctcaggtccccagcgatgttacgtcctttaaccagacaggactaaagcctggggaggaatacattgtcaatgtggtggctctgaaagaacaggcccgcagcccccctacctcggccagcgtctccacagtcattgacggccccacgcagatcctggttcgcgatgtctcggacactgtggcttttgtggagtggattccccctcgagccaaagtcgatttcattcttttgaaatatggcctggtgggcggggaaggtgggaggaccaccttccggctgcagcctcccctgagccaatactcagtgcaggccctgcggcctggctcccgatacgaggtgtcagtcagtgccgtccgagggaccaacgagagcgattctgccaccactcagttcacaacagagatcgatgcccccaagaacttgcgagttggttctcgcacagcaaccagccttgacctcgagtgggataacagtgaagccgaagttcaggagtacaaggttgtgtacagcaccctggcgggtgagcaatatcatgaggtactggtccccaggggcattggtccaaccaccagggccaccctgacagatctggtacctggcactgagtatggagttggaatatctgccgtcatgaactcacagcaaagcgtgccagccaccatgaatgccaggactgaacttgacagtccccgagacctcatggtgacagcctcctcagagacctccatctccctcatctggaccaaggccagtggccccattgaccactaccgaattacctttaccccatcctctgggattgcctcagaagtcaccgtacccaaggacaggacctcatacacactaacagatctagagcctggggcagagtacatcatttccgtcactgctgagaggggtcggcagcagagcttggagtccactgtggatgctttcacaggcttccgtcccatctctcatctgcacttttctcatgtgacctcctccagtgtgaacatcacttggagtgatccatctcccccagcagacagactcattcttaactacagccccagggatgaggaggaagagatgatggaggtctccctggatgccaccaagaggcatgctgtcctgatgggcctgcaaccagccacagagtatattgtgaaccttgtggctgtccatggcacagtgacctctgagcccattgtgggctccatcaccacaggaattgatcccccaaaagacatcacaattagcaatgtgaccaaggactcagtgatggtctcctggagccctcctgttgcatctttcgattactaccgagtatcatatcgacccacccaagtgggacgactagacagctcagtggtgcccaacactgtgacagaattcaccatcaccagactgaacccagctaccgaatacgaaatcagcctcaacagcgtgcggggcagggaggaaagcgagcgcatctgtactcttgtgcacacagccatggacaaccctgtggatctgattgctaccaatatcactccaacagaagccctgctgcagtggaaggcaccagtgggtgaggtggagaactacgtcattgttcttacacactttgcagtcgctggagagaccatccttgttgacggagtcagtgaggaatttcggcttgttgacctgcttcctagcacccactatactgccaccatgtatgccaccaatggacctctcaccagtggcaccatcagcaccaacttttctactctcctggaccctccggcaaacctgacagccagtgaagtcaccagacaaagtgccctgatctcctggcagcctcccagggcagagattgaaaattatgtcttgacctacaaatccaccgacggaagccgcaaggagctgattgtggatgcagaagacacctggattcgactggagggcctgttggagaacacagactacacggtgctcctgcaggcagcacaggacaccacgtggagcagcatcacctccaccgctttcaccacaggaggccgggtgttccctcatccccaagactgtgcccagcatttgatgaatggagacactttgagtggggtttaccccatcttcctcaatggggagctgagccagaaattacaagtgtactgtgatatgaccaccgacgggggcggctggattgtattccagaggcggcagaatggccaaactgattttttccggaaatgggctgattaccgtgttggcttcgggaacgtggaggatgagttctggctggggctggacaatatacacaggatcacatcccagggccgctatgagctgcgcgtggacatgcgggatggccaggaggccgccttcgcctcctacgacaggttctctgtcgaggacagcagaaacctgtacaaactccgcataggaagctacaacggcactgcgggggactccctcagctatcatcaaggacgccctttctccacagaggatagagacaatgatgttgcagtgactaactgtgccatgtcgtacaagggagcatggtggtataagaactgccaccggaccaacctcaatgggaagtacggggagtccaggcacagtcagggcatcaactggtaccattggaaaggccatgagttctccatcccctttgtggaaatgaagatgcgcccctacaaccaccgtctcatggcagggagaaaacggcagtccttacagttc

SEQ ID NO: 4417 - DNA, 2382 bp, Homo Sapiens
cacctgggggaactgaccgtggctgaggagacctccagctctctgcgcctgtcctggacggtagcccagggcccctttgactccttcgtggtccagtacagggacacggacgggcagcccagggcagtgcctgtggccgcagaccagcgcacagtcaccgtagaggacctggagcctggcaagaaatacaagtttctgctctacgggctccttgggggaaagcgcctgggcccggtctctgccctgggaatgacagccccagaagaggacacaccagccccagagttagccccagaggcccctgagcctcctgaagagccccgcctaggagtgctgaccgtgaccgacacaaccccagactccatgcgcctctcgtggagcgtggcccagggcccctttgattccttcgtggtccagtatgaggacacgaacgggcagccccaggccttgctcgtggacggcgaccagagcaagatcctcatctcaggcctggagcccagcaccccctacaggttcctcctctatggcctccatgaagggaagcgcctggggcccctctcagctgagggcaccacagggctggctcctgctggtcagacctcagaggagtcaaggccccgcctgtcccagctgtctgtgactgacgtgaccaccagttcactgaggctcaactgggaggccccaccgggggccttcgactccttcctgctccgctttggggttccatcaccaagcactctggagccgcatccgcgtccactgctgcagcgcgagctgatggtgccggggacgcggcactcggccgtgctccgggacctgcgttccgggactctgtacagcctgacactgtatgggctgcgaggaccccacaaggccgacagcatccagggaaccgcccgcaccctcagcccagttctggagagcccccgtgacctccaattcagtgaaatcagggagacctcagccaaggtcaactggatgcccccaccatcccgggcggacagcttcaaagtctcctacctgctggcggacggaggggagcctcagagtgtgcaggtggatggccaggcccggacccagaaactccaggggctgatcccaggcgctcgctatgaggtgaccgtggtctcggtccgaggctttgaggagagtgagcctctcacaggcttcctcaccacggttcctgacggtcccacacagttgcgtgcactgaacttgaccgagggattcgccgtgctgcactggaagcccccccagaatcctgtggacacctatgacgtccaggtcacagcccctggggccccgcctctgcaggcggagaccccaggcagcgcggtggactaccccctgcatgaccttgtcctccacaccaactacaccgccacagtgcgtggcctgcggggccccaacctcacttccccagccagcatcaccttcaccacagggctagaggcccctcgggacttggaggccaaggaagtgaccccccgcaccgccctgctcacttggactgagcccccagtccggcccgcaggctacctgctcagcttccacacccctggtggacagaaccaggagatcctgctcccaggagggatcacatctcaccagctccttggcctctttccctccacctcctacaatgcacggctccaggccatgtggggccagagcctcctgccgcccgtgtccacctctttcaccacgggtgggctgcggatccccttccccagggactgcggggaggagatgcagaacggagccggtgcctccaggaccagcaccatcttcctcaacggcaaccgcgagcggcccctgaacgtgttttgcgacatggagactgatgggggcggctggctggtgttccagcgccgcatggatggacagacagacttctggagggactgggaggactatgcccatggttttgggaacatctctggagagttctggctgggcaatgaggccctgcacagcctgacacaggcaggtgactactccatgcgcgtggacctgcgggctggggacgaggctgtgttcgcccagtacgactccttccacgtagactcggctgcggagtactaccgcctccacttggagggctaccacggcaccgcaggggactccatgagctaccacagcggcagtgtcttctctgcccgtgatcgggaccccaacagcttgctcatctcctgcgctgtctcctaccgaggggcctggtggtacaggaactgccactacgccaacctcaacgggctctacgggagcacagtggaccatcagggagtgagctggtaccactggaagggcttcgagttctcggtgcccttcacggaaatgaagctgagaccaagaaactttcgctccccagcggggggaggc

SEQ ID NO: 4418 - DNA, 972 bp, Homo Sapiens
tcttctcccacctcctcggcatcctccttctcctcctcggcgccgttcctggcttccgccgtgtccgcccagcccccgctgccggaccagtgccccgcgctgtgcgagtgctccgaggcagcgcgcacagtcaagtgcgttaaccgcaatctgaccgaggtgcccacggacctgcccgcctacgtgcgcaacctcttccttaccggcaaccagctggccgtgctccctgccggcgccttcgcccgccggccgccgctggcggagctggccgcgctcaacctcagcggcagccgcctggacgaggtgcgcgcgggcgccttcgagcatctgcccagcctgcgccagctcgacctcagccacaacccactggccgacctcagtcccttcgctttctcgggcagcaatgccagcgtctcggcccccagtccccttgtggaactgatcctgaaccacatcgtgccccctgaagatgagcggcagaaccggagcttcgagggcatggtggtggcggccctgctggcgggccgtgcactgcaggggctccgccgcttggagctggccagcaaccacttcctttacctgccgcgggatgtgctggcccaactgcccagcctcaggcacctggacttaagtaataattcgctggtgagcctgacctacgtgtccttccgcaacctgacacatctagaaagcctccacctggaggacaatgccctcaaggtccttcacaatggcaccctggctgagttgcaaggtctaccccacattagggttttcctggacaacaatccctgggtctgcgactgccacatggcagacatggtgacctggctcaaggaaacagaggtagtgcagggcaaagaccggctcacctgtgcatatccggaaaaaatgaggaatcgggtcctcttggaactcaacagtgctgacctggactgtgacccgattcttcccccatccctgcaaacctct

SEQ ID NO: 4419 - DNA, 843 bp, Homo Sapiens
tgtcctttccaatgttactgcttcggtgggcccaagctacttcttaggtgtgcgagtggggctgagttaaggcagccgcccagagacgttccgcctgacgcgcgtaacctgacgatagtaggcgcaaatctgaccgtactacgtgcggctgcctttgccggtggggatggtgatggagaccaagcagcgggtgtgagattaccccttttgagtgcattacgtttaacgcacaatcacattgaagtagtcgaggatggcgcgtttgacggcctacccagtctggccgctctagatttgtcacataacccactgagagcactgggcgggggtgcattcaggggtttgcctgcgctgaggtcactacaacttaatcacgctcttgtcaggggtggacccgctttacttgccgccctagacgctgccttggcaccgttagccgaactacgtttgttaggcctagcggggaatgctttgtcaagactaccccctgcggcccttaggttggcaaggctggaacaattagacgtccgtcttaacgctcttgctggcttagacccggatgaactaagagccctagaaagagacggtgggctacctggcccgagattgctattagcggataatcctctacgttgtggttgtgccgcaagaccgttgctggcatggcttagaaacgcaactgagcgtgtccccgattccagaagacttagatgcgctgctcccagagctctgctagatagaccactgttagatctggatggagctcgtttaagatgcgcggactcaggagcggacgcccgtggtgaagaggctgaagcggctggaccagaacttgaagcatct

SEQ ID NO: 4420 - DNA, 2484 bp, Homo Sapiens
ttcttccccttcatctcgagagggaaagaactcctttggggaaagcctgaggagtctcgtgtctctagcgtcttggaggaaagcaagcgcctggtggacaccgccatgtacgccacgatgcagagaaacctcaagaaaagaggaatcctttctgcagctcagcttctgtctttttccaaacttcctgagccaacaagcggagtgattgcccgagcagcagagataatggaaacatcaatacaagcgatgaaaagaaaagtcaacctgaaaactcaacaatcacagcatccaacggatgctttatcagaagatctgctgagcatcattgcaaacatgtctggatgtctcccttacatgctgcccccaaaatgcccaaacacttgcctggcgaacaaatacaggcccatcacaggagcttgcaacaacagagaccaccccagatggggcgcctccaacacggccctggcacgatggctccctccagtctatgaggacggcttcagtcagccccgaggctggaaccccggcttcttgtacaacgggttcccactgcccccggtccgggaggtgacaagacatgtcattcaagtttcaaatgaggttgtcacagatgatgaccgctattctgacctcctgatggcatggggacaatacatcgaccacgacatcgcgttcacaccacagagcaccagcaaagctgccttcgggggaggggctgactgccagatgacttgtgagaaccaaaacccatgttttcccatacaactcccggaggaggcccggccggccgcgggcaccgcctgtctgcccttctaccgctcttcggccgcctgcggcaccggggaccaaggcgcgctctttgggaacctgtccacggccaacccgcggcagcagatgaacgggttgacctcgttcctggacgcgtccaccgtgtatggcagctccccggccctagagaggcagctgcggaactggaccagtgccgaagggctgctccgcgtccacgcgcgcctccgggactccggccgcgcctacctgcccttcgtgccgccacgcgcgcctgcggcctgtgcgcccgagcccggcatccccggagagacccgcgggccctgcttcctggccggagacggccgcgccagcgaggtcccctccctgacggcactgcacacgctgtggctgcgcgagcacaaccgcctggccgcggcgctcaaggccctcaatgcgcactggagcgcggacgccgtgtaccaggaggcgcgcaaggtcgtgggcgctctgcaccagatcatcaccctgagggattacatccccaggatcctgggacccgaggccttccagcagtacgtgggtccctatgaaggctatgactccaccgccaaccccactgtgtccaacgtgttctccacagccgccttccgcttcggccatgccacgatccacccgctggtgaggaggctggacgccagcttccaggagcaccccgacctgcccgggctgtggctgcaccaggctttcttcagcccatggacattactccgtggaggtggtttggacccactaatacgaggccttcttgcaagaccagccaaactgcaggtgcaggatcagctgatgaacgaggagctgacggaaaggctctttgtgctgtccaattccagcaccttggatctggcgtccatcaacctgcagaggggccgggaccacgggctgccaggttacaatgagtggagggagttctgcggcctgcctcgcctggagacccccgctgacctgagcacagccatcgccagcaggagcgtggccgacaagatcctggacttgtacaagcatcctgacaacatcgatgtctggctgggaggcttagctgaaaacttcctccccagggctcggacagggcccctgtttgcctgtctcattgggaagcagatgaaggctctgcgggacggtgactggttttggtgggagaacagccacgtcttcacggatgcacagaggcgtgagctggagaagcactccctgtctcgggtcatctgtgacaacactggcctcaccagggtgcccatggatgccttccaagtcggcaaattccccgaagactttgagtcttgtgacagcatcactggcatgaacctggaggcctggagggaaacctttcctcaagacgacaagtgtggcttcccagagagcgtggagaatggggactttgtgcactgtgaggagtctgggaggcgcgtgctggtgtattcctgccggcacgggtatgagctccaaggccgggagcagctcacttgcacccaggaaggatgggatttccagcctcccctctgcaaagatgtgaacgagtgtgcagacggtgcccaccccccctgccacgcctctgcgaggtgcagaaacaccaaaggcggcttccagtgtctctgcgcggacccctacgagttaggagacgatgggagaacctgcgtagactccgggaggctccctcgg

SEQ ID NO: 4421 - DNA, 1374 bp, Homo Sapiens
gcgtccaggagaggggcgcctggcactgcaaactgcgagctaaaacctcagcagtctgaactgaactcctttctatggacgatcaaaagggatcctccctcttatttcttcggcacaatccatgttccctacactagggtttgggatttcatcccggataattctaaagaggctttcttgcaaagttctatcgtttattttgagttggaccttactgatccatacaccatcagcgcattgacctcatgccagatgttaccacaaggtgaaaacctacaggatgtactgccgcgtgacatatattgcaggttaaagcgtcacttggaatatgtaaaactgatgatgccgctgtggatgacgcctgaccaaagaggtaaaggtttgtatgctgactacctattcaacgctatcgcagggaactgggagagaaagaggcccgtatgggtgatgctgatggtgaactctcttactgaagttgacataaaaagcagaggcgtacccgtcctggatctgttcctagcacaagaggccgagaggctaaggaaacaaacaggtgctgttgagaaagttgaggagcaatgtcatcctttgaacggtcttaatttttctcaggtgatttttgcattaaaccaaacacttctacaacaggaatcattgagggccgggagtctgcaaataccatatactacggaggaccttatcaaacattacaactgcggggacctttccagcgttatacttagccacgactctagtcaggtaccaaatttcataaatgcaactctgcctcctcaggaacgtatcactgcacaggagatcgatagttacttacgtcgtgagcttatttacaaacgtaacgaaagaatcggtaaaagggtcaaagcgttgctagaagagttcccggacaagggtttcttcttcgccttcggagcgggccacttcatggggaataacacagttttggacgttctgcgtagagaaggctatgaggtcgaacacgcgcccgcgggaaggcccatacataagggtaaatcaaagaagacgtcaacgcgtcccaccctgagtacaatctttgcaccgaaagtcccaacacttgaggtgcccgcgccggaggccgtctctagcggccatagtaccttacctccattagtcagtcgtcccgggtcagcagatacaccaagtgaggcggaacagcgtttccgtaaaaagaggaggagatcacaaagacgtccaagattaagacaattttctgacctttgggtgcgtttagaggagtcagacatagttccacaactacaggttcctgttttagaccgtcatatatcaacggaattacgtctgccaagacgtgggcattctcaccactctcagatg

SEQ ID NO: 4422 - DNA, 555 bp, Homo Sapiens
gcaactaaattaactgaggaaaagtatgaactgaaagaggggcagaccctggatgtgaaatgtgactacacgctagagaagtttgccagcagccagaaagcttggcagataataagggacggagagatgcccaagaccctggcatgcacagagaggccttcaaagaattcccatccagtccaagtggggaggatcatactagaagactaccatgatcatggtttactgcgcgtccgaatggtcaaccttcaagtggaagattctggactgtatcagtgtgtgatctaccagcctcccaaggagcctcacatgctgttcgatcgcatccgcttggtggtgaccaagggtttttcagggacccctggctccaatgagaattctacccagaatgtgtataagattcctcctaccaccactaaggccttgtgcccactctataccagccccagaactgtgacccaagctccacccaagtcaactgccgatgtctccactcctgactctgaaatcaaccttacaaatgtgacagatatcatcagggttccggtgttcaac

SEQ ID NO: 4423 - DNA, 612 bp, Homo Sapiens
cacaacaccacagtgttccagggcgtggcgggccagtccctgcaggtgtcttgcccctatgactccatgaagcactgggggaggcgcaaggcctggtgccgccagctgggagagaagggcccatgccagcgtgtggtcagcacgcacaacttgtggctgctgtccttcctgaggaggtggaatgggagcacagccatcacagacgataccctgggtggcactctcaccattacgctgcggaatctacaaccccatgatgcgggtctctaccagtgccagagcctccatggcagtgaggctgacaccctcaggaaggtcctggtggaggtgctggcagaccccctggatcaccgggatgctggagatctctggttccccggggagtctgagagcttcgaggatgcccatgtggagcacagcatctccaggccatctcaaggctcccatctgccttcttgtctctccaaggagcctcttggaaggagaaatccccttcccacccacttccatccttctcctcctggcctgcatctttctcatcaagattctagcagccagcgccctctgggctgcagcctggcatggacagaagccagggacacatccacccag

SEQ ID NO: 4424 - DNA, 441 bp, Homo Sapiens
cagggcatagttggcagcctccctgaggtgctgcaggcacccgtgggaagctccattctggtgcagtgccactacaggctccaggatgtcaaagctcagaaggtgtggtgccggttcttgccggaggggtgccagcccctggtgtcctcagctgtggatcgcagagctccagcgggcaggcgtacgtttctcacagacctgggtgggggcctgctgcaggtggaaatggttaccctgcaggaagaggatgctggcgagtatggctgcatggtggatggggccagggggccccagattttgcacagagtctctctgaacatactgcccccagaggaagaagaagagacccataagattggcagtctggctgagaacgcattctcagaccctgcaggcagtgccaaccctttggaacccagccaggatgagaagagcatcccc

SEQ ID NO: 4425 - DNA, 750 bp, Homo Sapiens
ggcccctctgctgacagtgtatacacaaaagtgaggctccttgaaggggagactctgtctgtgcagtgctcctataagggctacaaaaaccgcgtggagggcaaggtttggtgcaaaatcaggaagaagaagtgtgagcctggctttgcccgagtctgggtgaaagggccccgctacttgctgcaggacgatgcccaggccaaggtggtcaacatcaccatggtggccctcaagctccaggactcaggccgatactggtgcatgcgcaatacctctgggatcctgtaccccttgatgggcttccagctggatgtgtctccagctccccaaagtgagaggaacattcctttcacacatctggacaacatcctcaagagtggaactgtcacaactggccaagcccctacctcaggccctgatgccccttttaccactggtgtgatggtgttcaccccaggactcatcaccttgcctaggctcttagcctccaccagacctgcctccaagacaggctacagcttcactgctaccagcaccaccagccagggacccaggaggaccatggggtcccagacagtgaccgcgtctcccagcaatgccagggactcctctgctggcccagaatccatctccactaagtctggggacctcagcaccagatcgcccaccacagggctctgcctcaccagcagatctctcctcaacagactaccctccatgccctccatcaggcaccaggatgtttactcc

SEQ ID NO: 4426 - DNA, 450 bp, Homo Sapiens
gaagaacttcacaaacacccaggacagaccctcctcctgcaatgccagtactcacccaagagagggccctatcagcccaaatcctggtgtcagcagacatctccaagtcggtgtaccttacttgtcaccagctccaagccctggacagcagttcagaagtctcattacacaatctgggacaagcccaatgctggcttcttcaacatcaccatgattcagctgacacagaatgactcgggattctactggtgtggaatctacaacgcttccgaaaacatcatcactgttcttagaaatatcagcctggtggtgtctccagccccaaccacgtctcctatgtggactcttccctggctcccaacaagcacagttctgatcacttctccagaggggacctctggccatccctccatcaatggctctgagaccaggaaatcaagagcccctgcc

SEQ ID NO: 4427 - DNA, 2013 bp, Homo Sapiens
gtgtgcccggagcgctgcgactgccagcatccccagcatctcctgtgcaccaacagggggctccgcgtagtgcccaagaccagctcgctgccgagcccccacgacgtgctcacctacagcctcggcggcaacttcataaccaacatcacggccttcgacttccaccgtctggggcagctcagacggctggacctgcagtacaaccagatccgctctctgcaccccaagaccttcgagaagctctcgcggctggaagagctgtacctggggaacaacctcttgcaggcgctcgccccgggcacgctggccccgctgcgcaagctgcgcatcctctacgccaacgggaacgagatcagccgcctaagccgcggctccttcgagggcctggagagtctagtcaagctgcggctggacgggaacgccctgggggcgctgccggacgcggtcttcgctcccttgggcaacctgctctacctacatctggagtccaaccggatccgctttctgggcaagaacgccttcgcccagctaggcaagctgcgcttcctcaacctctctgccaacgagctacagccctccctgcgccacgcggccaccttcgcaccgctgcgctccctctcctccctcatcctctcggccaacagcctgcagcacctcgggccgcgcatcttccagcacctgccacgtctcggcctgctctcgctcaggggcaaccagctcacgcacctcgcgcctgaggccttttggggcttggaggccctgcgcgagctgcgcctggagggtaatcggctgagccagctgccaactgcgctgctggagcctctgcacagcctggaggcgctggacctgagcggcaatgagctgtccgccctgcacccggccaccttcggccacctgggccggctgcgcgagctcagcctgcgcaacaacgcgctcagcgccctatccggggacatcttcgccgccagcccagccctttatcggctggatctagacggcaacggctggacctgcgactgccggctgcgaggcctgaagcgctggatgggcgactggcactcgcagggccggctcctcactgtcttcgtgcagtgtcgccaccccccggccctgcgaggcaaatacctggattacctggatgaccagcagctgcaaaatggatcctgcgcggatccctcgccctcagcttccctgaccgctgaccgcaggcggcagcccctacccacggccgcaggggaggagatgacgccacctgcaggtctcgcggaggagctgccgccgcagccgcagctccagcagcaggggcgatttctagctggggtggcctgggatggggccgccagggagctggtaggcaaccgcagcgctctaaggctgagtcggcggggcccgggcctccagcagcccagcccctccgtcgctgccgccgcgggcccggctccacagtccctagacctgcacaagaagccccagcggggccgtccgactcgggcagatcccgccctcgcggagcccaccccaacggcctctcctggctctgcgccatcgcccgccggcgacccctggcagcgcgcgacgaagcatcgtctgggcacggagcaccaggagcgtgccgcccagtccgacggtggggccgggctgccgccgctggtgtccgacccatgcgacttcaacaagttcattctgtgcaacctgacggtggaggcggtgggcgcagacagcgcctcggtgcgctgggccgtgcgcgagcaccgcagtccccggccgctgggcggcgcgcgcttccgcctgctctttgaccgctttggccagcagcccaagttccaccgcttcgtctacctgcctgagagcagcgactcggccacgctgcgcgagctgcgcggggacaccccctacctggtgtgcgtggagggcgtgcttgggggccgtgtctgccctgtggctccccgggaccactgcgcggggctggtcaccctaccggaggccgggagccggggcggcgtcgactaccag

SEQ ID NO: 4428 - DNA, 1179 bp, Homo Sapiens
ggaatggggtgttcgtctccaccctgcgagtgccatcaggaggaggacttcagagtcacctgcaaggatattcaacgcatccccagcttaccgcccagtacgcagactctgaagcttattgagactcacctgagaactattccaagtcatgcattttctaatctgcccaatatttccagaatctacgtatctatagatgtgactctgcagcagctggaatcacactccttctacaatttgagtaaagtgactcacatagaaattcggaataccaggaacttaacttacatagaccctgatgccctcaaagagctccccctcctaaagttccttggcattttcaacactggacttaaaatgttccctgacctgaccaaagtttattccactgatatattctttatacttgaaattacagacaacccttacatgacgtcaatccctgtgaatgcttttcagggactatgcaatgaaaccttgacactgaagctgtacaacaatggctttacttcagtccaaggatatgctttcaatgggacaaagctggatgctgtttacctaaacaagaataaatacctgacagttattgacaaagatgcatttggaggagtatacagtggaccaagcttgctggacgtgtctcaaaccagtgtcactgcccttccatccaaaggcctggagcacctgaaggaactgatagcaagaaacacctggactcttaagaaacttccactttccttgagtttccttcacctcacacgggctgacctttcttacccaagccactgctgtgcttttaagaatcagaagaaaatcagaggaatccttgagtccttgatgtgtaatgagagcagtatgcagagcttgcgccagagaaaatctgtgaatgccttgaatagccccctccaccaggaatatgaagagaatctgggtgacagcattgttgggtacaaggaaaagtccaagttccaggatactcataacaacgctcattattacgtcttctttgaagaacaagaggatgagatcattggttttggccaggagctcaaaaacccccaggaagagactctacaagcttttgacagccattatgactacaccatatgtggggacagtgaagacatggtgtgtacccccaagtccgatgagttcaacccgtgtgaagacataatgggc

SEQ ID NO: 4429 - DNA, 1011 bp, Homo Sapiens
acccggccatgcttccccgggtgccaatgcgaggtggagaccttcggccttttcgacagcttcagcctgactcgggtggattgtagcggcctgggcccccacatcatgccggtgcccatccctctggacacagcccacttggacctgtcctccaaccggctggagatggtgaatgagtcggtgttggcggggccgggctacacgacgttggctggcctggatctcagccacaacctgctcaccagcatctcacccactgccttctcccgccttcgctacctggagtcgcttgacctcagccacaatggcctgacagccctgccagccgagagcttcaccagctcacccctgagcgacgtgaaccttagccacaaccagctccgggaggtctcagtgtctgccttcacgacgcacagtcagggccgggcactacacgtggacctctcccacaacctcattcaccgcctcgtgccccaccccacgagggccggcctgcctgcgcccaccattcagagcctgaacctggcctggaaccggctccatgccgtgcccaacctccgagacttgcccctgcgctacctgagcctggatgggaaccctctagctgtcattggtccgggtgccttcgcggggctgggaggccttacacacctgtctctggccagcctgcagaggctccctgagctggcgcccagtggcttccgtgagctaccgggcctgcaggtcctggacctgtcgggcaaccccaagcttaactgggcaggagctgaggtgttttcaggcctgagctccctgcaggagctggacctttcgggcaccaacctggtgcccctgcctgaggcgctgctcctccacctcccggcactgcagagcgtcagcgtgggccaggatgtgcggtgccggcgcctggtgcgggagggcacctacccccggaggcctggctccagccccaaggtggccctgcactgcgtagacacccgggattctgctgccaggggccccaccatcttg

SEQ ID NO: 4430 - DNA, 393 bp, Homo Sapiens
tacgacttcactaactgtgactttgagaagattaaagcagcctatctcagtactatttctaaagacctgattacatatatgagtgggaccaaaagtaccgagttcaacaacaccgtctcttgtagcaatcggccacattgccttactgaaatccagagcctaaccttcaatcccaccgccggctgcgcgtcgctcgccaaagaaatgttcgccatgaaaactaaggctgccttagctatctggtgcccaggctattcggaaactcagataaatgctactcaggcaatgaagaagaggagaaaaaggaaagtcacaaccaataaatgtctggaacaagtgtcacaattacaaggattgtggcgtcgcttcaatcgacctttactgaaacaacag

SEQ ID NO: 4431 - DNA, 306 bp, Homo Sapiens
tacaccacaatggctgagcacttcctgacgttgctggtagtgcctgccatcaagaaagattatggttcccaggaagacttcactcaagtgtggaacaccaccatgaaagggctcaagtgctgtggcttcaccaactatacggattttgaggactcaccctacttcaaagagaacagtgcctttcccccattctgttgcaatgacaacgtcaccaacacagccaatgaaacctgcaccaagcaaaaggctcacgaccaaaaagtagagggttgcttcaatcagcttttgtatgacatccgaactaat

SEQ ID NO: 4432 - DNA, 342 bp, Homo Sapiens
ggcgtttggacatatgaacaggaacttatggttccagtacaatggtcagatatggtcactttgaaagccaggatgacaaattatggattacctagatatcggtggcttactcatgcttggaatttttttcagagagagtttaagtgctgtggagtagtatatttcactgactggttggaaatgacagagatggactggcccccagattcctgctgtgttagagaattcccaggatgttccaaacaggcccaccaggaagatctcagtgacctttatcaagagggttgtgggaagaaaatgtattcctttttgagaggaaccaaacaactgcaggtgctgagg

SEQ ID NO: 4433 - DNA, 222 bp, Homo Sapiens
tgcgcttgtttagccctgaaccaggagcaacagggtcagcttctggaggttggttggaacaatacggcaagtgctcgaaatgacatccagagaaatctaaactgctgtgggttccgaagtgttaacccaaatgacacctgtctggctagctgtgttaaaagtgaccactcgtgctcgccatgtgctccaatcataggagaatatgctggagaggttttgaga

SEQ ID NO: 4434 - DNA, 363 bp, Homo Sapiens
accttccggaaccagaccattgacttcctgaacgacaacattcgaagaggaattgagaactactatgatgatctggacttcaaaaacatcatggactttgttcagaaaaagttcaagtgctgtggcggggaggactaccgagattggagcaagaatcagtaccacgactgcagtgcccctggacccctggcctgtggggtgccctacacctgctgcatcaggaacacgacagaagttgtcaacaccatgtgtggctacaaaactatcgacaaggagcgtttcagtgtgcaggatgtcatctacgtgcggggctgcaccaacgccgtgatcatctggttcatggacaactacaccatcatggcg

SEQ ID NO: 4435 - DNA, 357 bp, Homo Sapiens
gtcttcaaggactggattcgagaccagctcaacctcttcatcaacaacaacgtcaaggcctaccgggacgacattgacctccagaacctcattgactttgctcaggaatactggtcttgctgcggagcccgaggccccaatgactggaacctcaatatctacttcaactgcactgacttgaaccccagccgggagcgctgcggggtgcccttctcctgctgcgtcagggaccctgcggaggatgtcctcaacacccagtgtggctacgacgtccggctcaaactggagctggagcagcagggcttcatccacaccaaaggctgcgtgggccagtttgagaagtggctgcaggacaac

SEQ ID NO: 4436 - DNA, 357 bp, Homo Sapiens
gccttcatcttcagggaaaatctcacccgagaattcttcaccaaggagctcaccaagcactaccagggcaataacgacacagacgtcttctctgccacctggaactcggtcatgatcacatttggttgctgcggggtcaacgggcctgaagactttaagtttgcatctgtgtttcgactcctgaccctggatagtgaagaggtgccggaggcctgctgccggagggaaccccaaagtcgggacggggtcctgctgagccgggaggagtgcctcctgggaaggagcctattcctaaacaagcagggctgttacacggtgatcctcaacaccttcgagacctacgtctacttggccgga

SEQ ID NO: 4437 - DNA, 231 bp, Homo Sapiens
ggcaagggggtagctatccgacatgttcagaccatgtatgaagaggcttacaatgattaccttaaagacaggggaaaaggcaatgggacactcatcaccttccactcaacatttcagtgctgtggaaaagaaagctccgaacaggtccaacctacatgcccaaaggagcttctaggacacaagaattgcatcgatgaaattgagaccataatcagtgttaagctccagctc

SEQ ID NO: 4438 - DNA, 318 bp, Homo Sapiens
tacagagcaaaggtggaaaatgaggttgatcgcagcattcagaaagtgtataagacctacaatggaaccaaccctgatgctgctagccgggctattgattatgtacagagacagctgcattgttgtggaattcacaactactcagactgggaaaatacagattggttcaaagaaaccaaaaaccagagtgtccctcttagctgctgcagagagactgccagcaattgtaatggcagcctggcccacccttccgacctctatgctgaggggtgtgaggctctagttgtgaagaagctacaagaaatcatgatgcatgtg

SEQ ID NO: 4439 - DNA, 240 bp, Homo Sapiens
tgctcatgtctggctattaaccgaagcaaacagacagatgtcatcaatgcttcttggtgggtcatgagcaacaagactcgggatgaactggaaagaagttttgattgttgtggcttattcaacctcacaaccctgtatcaacaagattatgatttctgcactgcaatctgcaagagccagagccccacatgccagatgtgtggagaaaagtttcttaagcattcagacgaagccctgaaa

SEQ ID NO: 4440 - DNA, 354 bp, Homo Sapiens
ttctcagacaaggctcgagggaaagtgagtgagatcatcaacaatgccattgtgcactaccgagatgacttggatctgcagaacctcattgattttggccagaaaaagtttagctgctgtggagggatttcctacaaggactggtctcagaacatgtatttcaactgctcagaagacaaccccagtcgagagcgctgctctgtgccttactcctgttgcttgcctactcctgaccaggcagtgatcaacactatgtgtggccaaggtatgcaggcctttgactacttggaagctagcaaagtcatctacaccaatggctgtattgacaagttggtcaactggatacacagcaac

SEQ ID NO: 4441 - DNA, 285 bp, Homo Sapiens
tacacggacaagattgacaggtatgcccagcaagacctgaagaaaggcttgcacctgtacggcacgcagggcaacgtgggcctcaccaacgcctggagcatcatccagaccgacttccgctgctgtggcgtctccaactacactgactggttcgaggtgtacaacgccacgcgggtacctgactcctgctgcttggagttcagtgagagctgtgggctgcacgcccccggcacctggtggaaggcgccgtgctacgagacggtgaaggtgtggcttcaggagaac

SEQ ID NO: 4442 - DNA, 357 bp, Homo Sapiens
gttttcaaagactggatcaaagaccagctgtatttctttataaacaacaacatcagagcatatcgggatgacattgatttgcaaaacctcatagacttcacccaggaatattggcagtgctgtggggcttttggagctgatgattggaacctaaatatttacttcaattgcacagattccaatgcaagtcgagagcgatgtggcgttccattctcctgctgcactaaagatcccgcagaagatgtcatcaacactcagtgtggctatgatgccaggcaaaaaccagaagttgaccagcagattgtaatctacacgaaaggctgtgtgccccagtttgagaagtggttgcaggacaat

SEQ ID NO: 4443 - DNA, 303 bp, Homo Sapiens
cgtcatgagatcaaggacaccttcctgaggacttacacggacactatgcagacttacaatggcaatgatgagaggagccgggcagtggaccatgtgcagcgcagcctgagctgctgtggtgtgcagaactacaccaactggagcaccagcccctacttcctggagcatggcatcccccccagctgctgcatgaacgaaactgattgtaatccccaggatctacacaatctgactgtggccgccaccaaagttaaccagaagggttgttatgatctggtaactagtttcatggagactaacatg

SEQ ID NO: 4444 - DNA, 288 bp, Homo Sapiens
aaatctaagtctgatcgcattgtgaatgaaactctctatgaaaacacaaagcttttgagcgccacaggggaaagtgaaaaacaattccaggaagccataattgtgtttcaagaagagtttaaatgctgcggtttggtcaatggagctgctgattggggaaataattttcaacactatcctgaattatgtgcctgtctagataagcagagaccatgccaaagctataatggaaaacaagtttacaaagagacctgtatttctttcataaaagacttcttggcaaaaaat

SEQ ID NO: 4445 - DNA, 291 bp, Homo Sapiens
tacatggacaaggtgaacgagaacgccaagaaggacctgaaggaaggcctgctgctgtaccacaccgagaacaacgtggggctgaagaacgcctggaacatcatccaggctgagatgcgatgctgtggtgtcactgactacacagactggtacccagtgctgggggagaacacggttcccgaccgctgctgcatggagaactcccagggctgcgggcgcaacgccaccacgcctttgtggagaacgggctgctatgaaaaggtgaagatgtggttcgatgacaataagcac

SEQ ID NO: 4446 - DNA, 1167 bp, Homo Sapiens
gcaggtctgaagctcatgggagccccggtgaagctgacagtgtctcaggggcagccggtgaagctcaactgcagtgtggaggggatggaggagcctgacatccagtgggtgaaggatggggctgtggtccagaacttggaccagttgtacatcccagtcagcgagcagcactggatcggcttcctcagcctgaagtcagtggagcgctctgacgccggccggtactggtgccaggtggaggatgggggtgaaaccgagatctcccagccagtgtggctcacggtagaaggtgtgccatttttcacagtggagccaaaagatctggcagtgccacccaatgcccctttccaactgtcttgtgaggctgtgggtccccctgaacctgttaccattgtctggtggagaggaactacgaagatcgggggacccgctccctctccatctgttttaaatgtaacaggggtgacccagagcaccatgttttcctgtgaagctcacaacctaaaaggcctggcctcttctcgcacagccactgttcaccttcaagcactgcctgcagcccccttcaacatcaccgtgacaaagctttccagcagcaacgctagtgtggcctggatgccaggtgccgatggccgagctctgctacagtcctgtacagttcaggtgacacaggccccaggaggctgggaagtcctggctgttgtggtccctgtgcccccctttacctgcctgctccgggacctggtgcctgccaccaactacagcctcagggtgcgctgtgccaatgccttggggccctctccctatgctgactgggtgccctttcagaccaagggtctagccccagccagcgctccccaaaacctccatgccatccgcacagattcaggcctcatcttggagtgggaagaagtgatccccgaggcccctttggaaggccccctgggaccctacaaactgtcctgggttcaagacaatggaacccaggatgagctgacagtggaggggaccagggccaatttgacaggctgggatccccaaaaggacctgatcgtacgtgtgtgcgtctccaatgcagttggctgtggaccctggagtcagccactggtggtctcttctcatgaccgtgcaggccagcagggccctcctcacagccgcacatcctgg

SEQ ID NO: 4447 - DNA, 57 bp, Homo Sapiens
ctccgtcctgtccaggcccaggcccagagcgattgcagttgctctacggtgagcccg

SEQ ID NO: 4448 - DNA, 1683 bp, Homo Sapiens
gacacctcagaagcaagatggtgctctgaatgtcacagcaatgccacctgcacggaggatgaggccgttacgacgtgcacctgtcaggagggcttcaccggcgatggcctgacctgcgtggacctggatgagtgcgccattcctggagctcacaactgctccgccaacagcagctgcgtaaacacgccaggctccttctcctgcgtctgccccgaaggcttccgcctgtcgcccggtctcggctgcacagacgtggatgagtgcgctgagcctgggcttagccactgccacgccctggccacatgtgtcaatgtggtgggcagctacttgtgcgtatgccccgcgggctaccggggggatggatggcactgtgagtgctccccgggctcctgcgggccggggttggactgcgtgcccgagggcgacgcgctcgtgtgcgcggatccgtgtcaggcgcaccgcaccctggacgagtactggcgcagcaccgagtacggggagggctacgcctgcgacacggacctgcgcggctggtaccgcccccatccgtccagcgacgagggcatcgtgagccgcaaggcctgcgcgcactggagcggccactgctgcctgtgggatgcgtccgtccaggtgaaggcctgtgccggcggctactacgtctacaacctgacagcgccccccgagtgtcacctggcgtactgcacagaccccagctccgtggaggggacgtgtgaggagtgcagtatagacgaggactgcaaatcgaataatggcagatggcactgccagtgcaaacaggacttcaacatcactgatatctccctcctggagcacaggctggaatgtggggccaatgacatgaaggtgtcgctgggcaagtgccagctgaagagtctgggcttcgacaaggtcttcatgtacctgagtgacagccggtgctcgggcttcaatgacagagacaaccgggactgggtgtctgtagtgaccccagcccgggatggcccctgtgggacagtgttgacgaggaatgaaacccatgccacttacagcaacaccctctacctggcagatgagatcatcatccgtgacctcaacatcaaaatcaactttgcatgctcctaccccctggacatgaaagtcagcctgaagaccgccctacagccaatggtcagtgctctaaacatcagagtgggcgggaccggcatgttcaccgtgcggatggcgctcttccagaccccttcctacacgcagccctaccaaggctcctccgtgacactgtccactgaggcttttctctacgtgggcaccatgttggatgggggcgacctgtcccgatttgcactgctcatgaccaactgctatgccacacccagtagcaatgccacggaccccctgaagtacttcatcatccaggacagatgcccacacactagagactcaactatccaagtggtggagaatggggagtcctcccagggccgattttccgtccagatgttccggtttgctggaaactatgacctagtctacctgcactgtgaagtctatctctgtgacaccatgaatgaaaagtgcaagcctacctgctctgggaccagattccgaagtgggagtgtcatagatcaatcccgtgtcctgaacttgggtcccatcacacggaaaggtgtccaggccacagtctca

SEQ ID NO: 4449 - DNA, 843 bp, Homo Sapiens
cagcagagtgccaccgtggccaacccagtgcctggtgccaacccggacctgcttccccacttcctggtggagcccgaggatgtgtacatcgtcaagaacaagccagtgctgcttgtgtgcaaggccgtgcccgccacgcagatcttcttcaagtgcaacggggagtgggtgcgccaggtggaccacgtgatcgagcgcagcacagacgggagcagtgggctgcccaccatggaggtccgcattaatgtctcaaggcagcaggtcgagaaggtgttcgggctggaggaatactggtgccagtgcgtggcatggagctcctcgggcaccaccaagagtcagaaggcctacatccgcatagcctatttgcgcaagaacttcgagcaggagccgctggccaaggaggtgtccctggagcagggcatcgtgctgccctgccgtccaccggagggcatccctccagccgaggtggagtggctccggaacgaggacctggtggacccgtccctggaccccaatgtatacatcacgcgggagcacagcctggtggtgcgacaggcccgccttgctgacacggccaactacacctgcgtggccaagaacatcgtggcacgtcgccgcagcgcctccgctgctgtcatcgtctacgtggacggcagctggagcccgtggagcaagtggtcggcctgtgggctggactgcacccactggcggagccgtgagtgctctgacccagcaccccgcaacggaggggaggagtgccagggcactgacctggacacccgcaactgtaccagtgacctctgtgtacacactgcttctggccctgaggacgtggccctctat

SEQ ID NO: 4450 - DNA, 1053 bp, Homo Sapiens
gggacagattcaggctctgaggttttgccagactcattccccagcgcacctgcggagccacttccttatttcttgcaagaacctcaagacgcttatatagtgaaaaataagcccgttgaattgaggtgcagagctttccctgctactcaaatctattttaagtgcaacggtgagtgggtcagccaaaacgatcatgtgacgcaagaagggctggacgaggcaactggactgcgtgtcagggaggtgcaaattgaagtgagcaggcaacaggtggaggagctttttgggctagaagattattggtgtcaatgtgtcgcttggagtagtgcaggcacaacaaagtcccgtagagcgtatgttcgtattgcgtatttgagaaaaaattttgatcaggagccgctggggaaggaggttcccctggatcatgaggtgttactacaatgcagacctcccgagggagtgcccgtcgcagaggttgaatggctaaagaatgaggatgtcatagaccccactcaggatactaactttttattgacgatagaccataaccttataattagacaggcaaggctaagcgatacagctaactacacctgtgttgctaagaatatagttgccaagagaagatctactactgctacagtaatagtatacgtaaatgggggctggtcttcttgggcggagtggtctccgtgcagtaacaggtgcgggaggggctggcagaagcgtactaggacatgcaccaacccggctccgctgaacggaggagccttttgtgaggggcaggcattccaaaaaacagcatgcaccacaatttgtccggtagacggcgcttggacggagtggagtaaatggagcgcgtgctcaactgaatgcgctcactggcgtagtagagagtgtatggcaccgcctcctcaaaatggtggtagggactgtagtggaactctgttggatagcaaaaactgcactgacggtctttgcatgcagaacaaaaagactctatctgatccaaatagtcaccttcttgaggcgtccggggacgcggccttgtac

SEQ ID NO: 4451 - DNA, 1077 bp, Homo Sapiens
caagatgatgacttttttcatgaactcccagaaacttttccttctgatccacctgagcctctgccacatttccttattgagcctgaagaagcttatattgtgaagaataagcctgtgaacctgtactgtaaagcaagccctgccacccagatctatttcaagtgtaatagcgaatgggttcatcagaaggaccacatagtagatgaaagagtagatgaaacttccggtctcattgtccgggaagtgagcattgagatttcgcgccagcaagtggaagaactctttggacctgaagattactggtgccagtgtgtggcctggagctccgcgggtaccacaaagagccggaaggcgtatgtgcgcattgcatatctacggaagacatttgagcaggaacccctaggaaaggaagtgtctttggaacaggaagtcttactccagtgtcgaccacctgaagggatcccagtggctgaggtggaatggttgaaaaatgaagacataattgatcccgttgaagatcggaatttttatattattattgatcacaacctcatcataaagcaggcccgactctctgatactgcaaattacacctgtgttgccaaaaacattgttgccaagaggaaaagtacaactgccactgtcatagtctatgtcaacggtggctggtccacctggacggagtggtctgtgtgtaacagccgctgtggacgagggtatcagaaacgtacaaggacttgtaccaacccggcaccactcaatgggggtgccttctgtgaagggcagagtgtgcagaaaatagcctgtactacgttatgcccagtggatggcaggtggacgccatggagcaagtggtctacttgtggaactgagtgcacccactggcgcaggagggagtgcacggcgccagcccccaagaatggaggcaaggactgcgacggcctcgtcttgcaatccaagaactgcactgatgggctttgcatgcagagtttcatttatcccatttcaactgaacagagaacccagaatgaatatggattttcttctgctcctgattcagatgatgttgctctctat

SEQ ID NO: 4452 - DNA, 1041 bp, Homo Sapiens
gctaggggaactgacaacggtgaggcgttaccagaatcaattcctagtgcaccggggaccttacctcactttatcgaagagcctgatgacgcttacatcataaaatcaaatccgatagcgctaagatgcaaggcacgtccagcaatgcaaattttcttcaaatgcaacggcgaatgggttcaccagaatgaacatgtaagtgaagaaactttagatgaaagctctggtctaaaggtgagagaagtcttcattaacgtaacgaggcaacaagtagaagactttcatgggccggaggactactggtgtcaatgtgttgcctggagtcatcttggaacgtccaaatctagaaaggcttcagtcaggattgcctacctaagaaagaacttcgaacaagacccgcaggggagagaagtcccgattgaaggtatgatagttcttcactgtaggccaccagagggcgtccctgcggcagaagtggaatggcttaagaatgaggagccgatagatagcgagcaagatgaaaatatagatactcgtgcggatcacaatcttattataagacaggcccgtcttagtgacagtggcaactatacgtgtatggccgctaacatagttgcgaagaggagaagcctgtccgccactgtggtggtctatgttaatggaggatggtcctcatggaccgaatggtccgcgtgtaacgtcagatgtgggcgtggctggcagaagaggagtagaacttgtaccaaccccgcaccacttaatgggggagcattttgtgagggtatgagcgtacagaagataacttgcacctctctatgcccggtagacggctcttgggaagtttggtccgagtggagcgtctgctccccggagtgtgagcacttaaggatccgtgagtgtaccgcgccgccacctcgtaacgggggcaaattctgtgaagggcttagccaggagtccgaaaattgcaccgacgggctgtgcatccttgataagaagcctttgcacgaaataaaaccccaatcaatagaaaatgctagtgat

SEQ ID NO: 4453 - DNA, 351 bp, Homo Sapiens
acgtcctacacccaccgtgactacatggtgtccaacccatccctgatcaccaagcagatgctgaccttctacagcgcggacaccgaccagggccaggagctgacccgcctctgggaccgcgtcatgattgagcaagaatgctgtggcacatctggtcccatggactgggtgaacttcacgtcagccttccgggcggccactccggaggtggtgttcccctggcccccactgtgctgtcgccggacgggaaacttcatccccctcaacgaggagggctgccgcctggggcacatggactacctgttcaccaaggctggagtacagtggcacaatctcagctcactgcagcgt

SEQ ID NO: 4454 - DNA, 366 bp, Homo Sapiens
acagcagcaacacaacgagactttttcacacccaacctcttcctgaagcagatgctagagaggtaccaaaacaacagccctccaaacaatgatgaccagtggaaaaacaatggagtcaccaaaacctgggacaggctcatgctccaggacaattgctgtggcgtaaatggtccatcagactggcaaaaatacacatctgccttccggactgagaataatgatgctgactatccctggcctcgtcaatgctgtgttatgaacaatcttaaagaacctctcaacctggaggcttgtaaactaggcgtgcctggtttttatcacaatcagggctgctatgaactgatctctggtccaatgaaccgacac

SEQ ID NO: 4455 - DNA, 1656 bp, Homo Sapiens
tgcccatccggctgccagtgcagccagccacagacagtcttctgcactgcccgccaggggaccacggtgccccgagacgtgccacccgacacggtggggctgtacgtctttgagaacggcatcaccatgctcgacgcaggcagctttgccggcctgccgggcctgcagctcctggacctgtcacagaaccagatcgccagcctgcccagcggggtcttccagccactcgccaacctcagcaacctggacctgacggccaacaggctgcatgaaatcaccaatgagaccttccgtggcctgcggcgcctcgagcgcctctacctgggcaagaaccgcatccgccacatccagcctggtgccttcgacacgctcgaccgcctcctggagctcaagctgcaggacaacgagctgcgggcactgcccccgctgcgcctgccccgcctgctgctgctggacctcagccacaacagcctcctggccctggagcccggcatcctggacactgccaacgtggaggcgctgcggctggctggtctggggctgcagcagctggacgaggggctcttcagccgcttgcgcaacctccacgacctggatgtgtccgacaaccagctggagcgagtgccacctgtgatccgaggcctccggggcctgacgcgcctgcggctggccggcaacacccgcattgcccagctgcggcccgaggacctggccggcctggctgccctgcaggagctggatgtgagcaacctaagcctgcaggccctgcctggcgacctctcgggcctcttcccccgcctgcggctgctggcagctgcccgcaaccccttcaactgcgtgtgccccctgagctggtttggcccctgggtgcgcgagagccacgtcacactggccagccctgaggagacgcgctgccacttcccgcccaagaacgctggccggctgctcctggagcttgactacgccgactttggctgcccagccaccaccaccacagccacagtgcccaccacgaggcccgtggtgcgggagcccacagccttgtcttctagcttggctcctacctggcttagccccacagcgccggccactgaggcccccagcccgccctccactgccccaccgactgtagggcctgtcccccagccccaggactgcccaccgtccacctgcctcaatgggggcacatgccacctggggacacggcaccacctggcgtgcttgtgccccgaaggcttcacgggcctgtactgtgagagccagatggggcaggggacacggcccagccctacaccagtcacgccgaggccaccacggtccctgaccctgggcatcgagccggtgagccccacctccctgcgcgtggggctgcagcgctacctccaggggagctccgtgcagctcaggagcctccgtctcacctatcgcaacctatcgggccctgataagcggctggtgacgctgcgactgcctgcctcgctcgctgagtacacggtcacccagctgcggcccaacgccacttactccgtctgtgtcatgcctttggggcccgggcgggtgccggagggcgaggaggcctgcggggaggcccatacacccccagccgtccactccaaccacgccccagtcacccaggcccgcgagggcaacctgccg

SEQ ID NO: 4456 - DNA, 2022 bp, Homo Sapiens
tttaaaatcgagaccaccccagaatctagatatcttgctcagattggtgactccgtctcattgacttgcagcaccacaggctgtgagtccccatttttctcttggagaacccagatagatagtccactgaatgggaaggtgacgaatgaggggaccacatctacgctgacaatgaatcctgttagttttgggaacgaacactcttacctgtgcacagcaacttgtgaatctaggaaattggaaaaaggaatccaggtggagatctactcttttcctaaggatccagagattcatttgagtggccctctggaggctgggaagccgatcacagtcaagtgttcagttgctgatgtatacccatttgacaggctggagatagacttactgaaaggagatcatctcatgaagagtcaggaatttctggaggatgcagacaggaagtccctggaaaccaagagtttggaagtaacctttactcctgtcattgaggatattggaaaagttcttgtttgccgagctaaattacacattgatgaaatggattctgtgcccacagtaaggcaggctgtaaaagaattgcaagtctacatatcacccaagaatacagttatttctgtgaatccatccacaaagctgcaagaaggtggctctgtgaccatgacctgttccagcgagggtctaccagctccagagattttctggagtaagaaattagataatgggaatctacagcacctttctggaaatgcaactctcaccttaattgctatgaggatggaagattctggaatttatgtgtgtgaaggagttaatttgattgggaaaaacagaaaagaggtggaattaattgttcaagagaaaccatttactgttgagatctcccctggaccccggattgctgctcagattggagactcagtcatgttgacatgtagtgtcatgggctgtgaatccccatctttctcctggagaacccagatagacagccctctgagcgggaaggtgaggagtgaggggaccaattccacgctgaccctgagccctgtgagttttgagaacgaacactcttatctgtgcacagtgacttgtggacataagaaactggaaaagggaatccaggtggagctctactcattccctagagatccagaaatcgagatgagtggtggcctcgtgaatgggagctctgtcactgtaagctgcaaggttcctagcgtgtacccccttgaccggctggagattgaattacttaagggggagactattctggagaatatagagtttttggaggatacggatatgaaatctctagagaacaaaagtttggaaatgaccttcatccctaccattgaagatactggaaaagctcttgtttgtcaggctaagttacatattgatgacatggaattcgaacccaaacaaaggcagagtacgcaaacactttatgtcaatgttgcccccagagatacaaccgtcttggtcagcccttcctccatcctggaggaaggcagttctgtgaatatgacatgcttgagccagggctttcctgctccgaaaatcctgtggagcaggcagctccctaacggggagctacagcctctttctgagaatgcaactctcaccttaatttctacaaaaatggaagattctggggtttatttatgtgaaggaattaaccaggctggaagaagcagaaaggaagtggaattaattatccaagttactccaaaagacataaaacttacagcttttccttctgagagtgtcaaagaaggagacactgtcatcatctcttgtacatgtggaaatgttccagaaacatggataatcctgaagaaaaaagcggagacaggagacacagtactaaaatctatagatggcgcctataccatccgaaaggcccagttgaaggatgcgggagtatatgaatgtgaatctaaaaacaaagttggctcacaattaagaagtttaacacttgatgttcaaggaagagaaaacaacaaagactatttttctcctgag

SEQ ID NO: 4457 - DNA, 363 bp, Homo Sapiens
gcacccatggcagaaggaggagggcagaatcatcacgaagtggtgaagttcatggatgtctatcagcgcagctactgccatccaatcgagaccctggtggacatcttccaggagtaccctgatgagatcgagtacatcttcaagccatcctgtgtgcccctgatgcgatgcgggggctgctgcaatgacgagggcctggagtgtgtgcccactgaggagtccaacatcaccatgcagattatgcggatcaaacctcaccaaggccagcacataggagagatgagcttcctacagcacaacaaatgtgaatgcagaccaaagaaagatagagcaagacaagaaaaatgtgacaagccgaggcgg

SEQ ID NO: 4458 - DNA, 558 bp, Homo Sapiens
cctgtctcccagcctgatgcccctggccaccagaggaaagtggtgtcatggatagatgtgtatactcgcgctacctgccagccccgggaggtggtggtgcccttgactgtggagctcatgggcaccgtggccaaacagctggtgcccagctgcgtgactgtgcagcgctgtggtggctgctgccctgacgatggcctggagtgtgtgcccactgggcagcaccaagtccggatgcagatcctcatgatccggtacccgagcagtcagctgggggagatgtccctggaagaacacagccagtgtgaatgcagacctaaaaaaaaggacagtgctgtgaagccagacagggctgccactccccaccaccgtccccagccccgttctgttccgggctgggactctgcccccggagcaccctccccagctgacatcacccatcccactccagccccaggcccctctgcccacgctgcacccagcaccaccagcgccctgacccccggacctgccgctgccgctgccgacgccgcagcttcctccgttgccaagggcggggct

SEQ ID NO: 4459 - DNA, 348 bp, Homo Sapiens
gcacattataatacagagatcttgaaaagtattgataatgagtggagaaagactcaatgcatgccacgggaggtgtgtatagatgtggggaaggagtttggagtcgcgacaaacaccttctttaaacctccatgtgtgtccgtctacagatgtgggggttgctgcaatagtgaggggctgcagtgcatgaacaccagcacgagctacctcagcaagacgttatttgaaattacagtgcctctctctcaaggccccaaaccagtaacaatcagttttgccaatcacacttcctgccgatgcatgtctaaactggatgtttacagacaagttcattccattattagacgt

SEQ ID NO: 4460 - DNA, 2226 bp, Homo Sapiens
gggagaaaagccaaatgtgaaccctcccaattccagtgcacaaatggtcgctgtattacgctgttgtggaaatgtgatggggatgaagactgtgttgacggcagtgatgaaaagaactgtgtaaagaagacgtgtgctgaatctgacttcgtgtgcaacaatggccagtgtgttcccagccgatggaagtgtgatggagatcctgactgcgaagatggttcagatgaaagcccagaacagtgccatatgagaacatgccgcatacatgaaatcagctgtggcgcccattctactcagtgtatcccagtgtcctggagatgtgatggtgaaaatgattgtgacagtggagaagatgaagaaaactgtggcaatataacatgtagtcccgacgagttcacctgctccagtggccgctgcatctccaggaactttgtatgcaatggccaggatgactgcagcgatggcagtgatgagctggactgtgccccgccaacctgtggcgcccatgagttccagtgcagcacctcctcctgcatccccatcagctgggtatgcgacgatgatgcagactgctccgaccaatctgatgagtccctggagcagtgtggccgtcagccagtcatacacaccaagtgtccagccagcgaaatccagtgcggctctggcgagtgcatccataagaagtggcgatgtgatggggaccctgactgcaaggatggcagtgatgaggtcaactgtccctctcgaacttgccgacctgaccaatttgaatgtgaggatggcagctgcatccatggcagcaggcagtgtaatggtatccgagactgtgtcgatggttctgatgaagtcaactgcaaaaatgtcaatcagtgcttgggccctggaaaattcaagtgcagaagtggagaatgcatagatatcagcaaagtatgtaaccaggagcaggactgcagggactggagtgatgagcccctgaaagagtgtcatataaacgaatgcttggtaaataatggtggatgttctcatatctgcaaagacctagttataggctacgagtgtgactgtgcagctgggtttgaactgatagataggaaaacctgtggagatattgatgaatgccaaaatccaggaatctgcagtcaaatttgtatcaacttaaaaggcggttacaagtgtgaatgtagtcgtggctatcaaatggatcttgctactggcgtgtgcaaggcagtaggcaaagagccaagtctgatcttcactaatcgaagagacatcaggaagattggcttagagaggaaagaatatatccaactagttgaacagctaagaaacactgtggctctcgatgctgacattgctgcccagaaactattctgggccgatctaagccaaaaggctatcttcagtgcctcaattgatgacaaggttggtagacatgttaaaatgatcgacaatgtctataatcctgcagccattgctgttgattgggtgtacaagaccatctactggactgatgcggcttctaagactatttcagtagctaccctagatggaaccaagaggaagttcctgtttaactctgacttgcgagagcctgcctccatagctgtggacccactgtctggctttgtttactggtcagactggggtgaaccagctaaaatagaaaaagcaggaatgaatggattcgatagacgtccactggtgacagcggatatccagtggcctaacggaattacacttgaccttataaaaagtcgcctctattggcttgattctaagttgcacatgttatccagcgtggacttgaatggccaagatcgtaggatagtactaaagtctctggagttcctagctcatcctcttgcactaacaatatttgaggatcgtgtctactggatagatggggaaaatgaagcagtctatggtgccaataaattcactggatcagagctagccactctagtcaacaacctgaatgatgcccaagacatcattgtctatcatgaacttgtacagccatcaggtaaaaattggtgtgaagaagacatggagaatggaggatgtgaatacctatgcctgccagcaccacagattaatgatcactctccaaaatatacctgttcctgtcccagtgggtacaatgtagaggaaaatggccgagactgtcaaaggatcaatgtgaccacagcagtatcagaggtcagtgttcccccaaaagggacttct

SEQ ID NO: 4461 - DNA, 633 bp, Homo Sapiens
gtgcaagtgaccatcccagacggtttcgtgaacgtgactgttggatctaatgtcactctcatctgcatctacaccaccactgtggcctcccgagaacagctttccatccagtggtctttcttccataagaaggagatggagccaatttctatttacttttctcaaggtggacaagctgtagccatcgggcaatttaaagatcgaattacagggtccaacgatccaggtaatgcatctatcactatctcgcatatgcagccagcagacagtggaatttacatctgcgatgttaacaaccccccagactttctcggccaaaaccaaggcatcctcaacgtcagtgtgttagtgaaaccttctaagcccctttgtagcgttcaaggaagaccagaaactggccacactatttccctttcctgtctctctgcgcttggaacaccttcccctgtgtactactggcataaacttgagggaagagacatcgtgccagtgaaagaaaacttcaacccaaccaccgggattttggtcattggaaatctgacaaattttgaacaaggttattaccagtgtactgccatcaacagacttggcaatagttcctgcgaaatcgatctcacttcttcacatccagaa

SEQ ID NO: 4462 - DNA, 1149 bp, Homo Sapiens
gttgtcattggagaagttcatgagaatgttactctgcactgtggcaacatctcgggactgaggggccaggtgacctggtaccggaacaactcggagcctgtcttccttctctcgtccaactctagcctccggccagctgagcctcgcttctctctagtggatgccacctccctgcacattgaatcgctgagcctgggagatgagggaatctacacctgccaggagatcctgaatgtgactcagtggttccaagtgtggctgcaggtggccagcggcccctatcagattgaggtccacatcgtggccaccggcacactccccaacggcaccctctatgcagccaggggctcccaggtggacttcagctgcaacagcagctccaggccaccacccgtggttgaatggtggttccaggccctgaattccagcagcgagtcctttggccacaacctgacagtcaactttttctcactgttactgatatcgccaaacctccaagggaactacacctgtttagccttgaatcagctcagcaagagacatcgaaaggtgaccaccgagctcctggtctactatccccctccatcagctccccagtgctgggcacagatggcatcaggatcgttcatgttgcagcttacctgtcgctgggatgggggataccctgaccctgacttcctgtggatagaagagccaggaggtgtaatcgtggggaagtcaaagctgggggtggaaatgctgagcgagtcccagctgtcggatggcaagaagttcaagtgtgttacaagccacatagttgggccagagtcgggcgccagctgcatggtgcagatcaggggtccctcccttctctctgagcccatgaagacttgcttcactgggggcaatgtgacgcttacatgccaggtgtctggggcctacccccctgccaagatcctgtggctgaggaaccttacccagcccgaggtgatcatccagcctagcagccgccatctcattacccaggatggccagaactccaccctcactatccacaactgctcccaggacctggatgagggctactacatctgccgagctgacagccctgtaggggtgagggagatggaaatctggctgagtgtgaaagaacctttaaatatcgggggg

SEQ ID NO: 4463 - DNA, 660 bp, Homo Sapiens
gtggaggtgaaggtacccacagagccgctgagcacgcccctggggaagacagccgagctgacctgcacctacagcacgtcggtgggagacagcttcgccctggagtggagctttgtgcagcctgggaaacccatctctgagtcccatccaatcctgtacttcaccaatggccatctgtatccaactggttctaagtcaaagcgggtcagcctgcttcagaacccccccacagtgggggtggccacactgaaactgactgacgtccacccctcagatactggaacctacctctgccaagtcaacaacccaccagatttctacaccaatgggttggggctaatcaaccttactgtgctggttccccccagtaatcccttatgcagtcagagtggacaaacctctgtgggaggctctactgcactgagatgcagctcttccgagggggctcctaagccagtgtacaactgggtgcgtcttggaacttttcctacaccttctcctggcagcatggttcaagatgaggtgtctggccagctcattctcaccaacctctccctgacctcctcgggcacctaccgctgtgtggccaccaaccagatgggcagtgcatcctgtgagctgaccctctctgtgaccgaaccctcccaaggccgagtggcc

SEQ ID NO: 4464 - DNA, 792 bp, Homo Sapiens
cgtcccatcctggaagtgccagagagtgtaacaggaccttggaaaggggatgtgaatcttccctgcacctatgaccccctgcaaggctacacccaagtcttggtgaagtggctggtacaacgtggctcagaccctgtcaccatctttctacgtgactcttctggagaccatatccagcaggcaaagtaccagggccgcctgcatgtgagccacaaggttccaggagatgtatccctccaattgagcaccctggagatggatgaccggagccactacacgtgtgaagtcacctggcagactcctgatggcaaccaagtcgtgagagataagattactgagctccgtgtccagaaactctctgtctccaagcccacagtgacaactggcagcggttatggcttcacggtgccccagggaatgaggattagccttcaatgccaggctcggggttctcctcccatcagttatatttggtataagcaacagactaataaccaggaacccatcaaagtagcaaccctaagtaccttactcttcaagcctgcggtgatagccgactcaggctcctatttctgcactgccaagggccaggttggctctgagcagcacagcgacattgtgaagtttgtggtcaaagactcctcaaagctactcaagaccaagactgaggcacctacaaccatgacataccccttgaaagcaacatctacagtgaagcagtcctgggactggaccactgacatggatggctaccttggagagaccagtgctgggccaggaaagagcctgcct

SEQ ID NO: 4465 - DNA, 726 bp, Homo Sapiens
gtgcggatcaacggggatggacaggaggtcctgtacctggcagaaggtgataatgtgaggctgggctgcccctacgtcctggaccctgaggactatggtcccaatgggctggacatcgagtggatgcaggtcaactcagaccccgcccaccaccgagagaacgtgttccttagttaccaggacaagaggatcaaccatggcagccttccccatctgcagcagagggtccgctttgcagcctcagacccaagccagtacgatgcctccatcaacctcatgaacctgcaggtatctgatacagccacttatgagtgccgggtgaagaagaccaccatggccacccggaaggtcattgtcactgtccaagcacgacctgcagtgcccatgtgctggacagagggccacatgacatatggcaacgatgtggtgctgaagtgctatgccagtgggggctcccagcccctctcctacaagtgggccaagatcagtgggcaccattacccctatcgagctgggtcttacacctcccagcacagctaccactcagagctgtcctaccaggagtccttccacagctccataaaccaaggcctgaacaatggggacctggtgttgaaggatatctccagagcagatgatgggctgtatcagtgcacagtggccaacaacgtgggctacagtgtttgtgtggtggaggtgaaggtctcagactcccggcgtataggc

SEQ ID NO: 4466 - DNA, 357 bp, Homo Sapiens
tacgaagatgagaaaaagaatgagaaaccgcccaagccctccctccacgcctggcccagctcggtggttgaagccgagagcaatgtgaccctgaagtgtcaggctcattcccagaatgtgacatttgtgctgcgcaaggtgaacgactctgggtacaagcaggaacagagctcggcagaaaacgaagctgaattccccttcacggacctgaagcctaaggatgctgggaggtacttttgtgcctacaagacaacagcctcccatgagtggtcagaaagcagtgaacacttgcagctggtggtcacagataaacacgatgaacttgaagctccctcaatgaaaacagacaccagaacc

SEQ ID NO: 4467 - DNA, 663 bp, Homo Sapiens
tcttctcaagcaaaatttaccgagtttccgcggaacgtgacggcgaccgaggggcagaatgtggagatgtcctgcgccttccagagcggctccgcctcggtgtatctggagatccaatggtggttcctgcgggggccggaggacctggatcccggggccgagggggccggcgcgcaggtgaagctcttgcccgacagagacccggacagcgacgggaccaagatcagcacagtgaaagtccaaggcaatgacatctcccacaagcttcagatttccaaagtgaggaaaaaggatgaaggcttatatgagtgcagggtgactgatgccaactacggggagcttcaggaacacaaggcccaagcctatctgaaagtcaatgcaaacagccatgcccgcagaatgcaggccttcgaagcctcgcccatgtggctgcaggatatgaagccccgcaagaacgtctccgcagccatccccagcagcatccatggctctgccaaccaacgaacgcactccacctccagccctcaagtggtagccaaaatccccaaacaaagtccacaatcaggtatggaaacccatttcgagccttttattttaccactcacaaacgctccacagaaaggtcagtcgtatagagtagacagatttatgaatggtgatttt

SEQ ID NO: 4468 - DNA, 705 bp, Homo Sapiens
gcttttaccgaggttccaaaggacgtgaccgttagagagggtgatgatatagagatgccttgcgctttccgtgcctccggtgcgactagctactcactggagatccagtggtggtatctaaaagagcctccgcgtgagctactacatgagttagcgttatctgtgccgggcgctcgttccaaggtgacaaacaaagacgcaacaaaaattagcactgtccgtgtgcagggcaacgacatctctcacaggttaaggctttctgcggtgcgtttacaagatgagggagtatatgaatgccgtgtctctgattatagcgatgatgacactcaagaacacaaagctcaagcaatgttgagggtcctttccaggtttgctcccccgaacatgcaagcagcagaagcggtaagccatatacaatcatcaggcccccgtcgtcacgggcctgcctctgccgctaatgcaaataacgccggagcggcttcacgtacaacgagtgagcctggaaggggagataaaagtccaccaccagggagtcctcctgcggcaatcgatcccgctgttcccgaggccgcagccgcctctgcggcacataccccgacgacaacagtggcagccgctgcagcggcatctagcgcgtctccccctagcgggcaagcagtacttcttcgtcagagacacgggtccggaaccgggagaagttacact

SEQ ID NO: 4469 - DNA, 540 bp, Homo Sapiens
acgcggcccgccggccacgcgccctgggacaaccacgtctccggccacgccctgttcacagagacaccccatgacatgacagcacggacgggcgaggacgtggagatggcctgctccttccgcggcagcggctccccctcctactcgctggagatccagtggtggtatgtacggagccaccgggactggaccgacaagcaggcgtgggcctcgaaccagctaaaagcatctcagcaggaagacgcagggaaggaggcaaccaaaataagtgtggtcaaggtggtgggcagcaacatctcccacaagctgcgcctgtcccgggtgaagcccacggacgaaggttcctacgagtgccgcgtcatcgacttcagcgacggcaaggcccggcaccacaaggtcaaggcctacctgcgggtgcagccaggggagaactccgtcctgcatctgcccgaagcccctcccgccgcgcccgccccgccgccccccaagccaggcaaggagctgaggaagcgctcggtggaccaggaggcctgcagcctc

SEQ ID NO: 4470 - DNA, 471 bp, Homo Sapiens
ctcaatgtcactgtgtccccggggcccgtggttgactacctggagggggagaatgccactctcctctgccacgtctcccagaaaaggcggaaggacagcttgctggccgtgcgctggttctttgcacactcctccgactcccaggaggccttgatggtgaagatgaccaagctccgggtggtgcagtactatgggaatttcagccgcagcgccaaacggcggaggctgcgcctgctggaggagcagcggggggcgctctacaggctctccgtcttgacactgcagccctccgatcaagggcattacgtctgcagagtccaggaaatcagcaggcacaggaacaagtggacggcctggtccaatggctcctcagccacggaaatgagagtcatttccctcaaagcttctgaagagtcatcctttgagaaaacaaaagagacttgggcattttttgaagatctctatgtgtat

SEQ ID NO: 4471 - DNA, 357 bp, Homo Sapiens
ttacaatcacagggagtatctctttacattccccaggccacaatcaatgccacggtcaaggaggatatactgctaagcgttgaatactcctgtcacggagtccccactatcgaatggacctatagtagtaactggggcacacagaagatagtggagtggaagccagggacgcaagcaaacataagccagtcccacaaggacagagtatgcacatttgataacggtagcatccagctattctccgttggcgtccgtgacagtggctattacgttattactgtcactgaacgtttagggtccagccaatttgggacgatagtattacacgtttctgagattctatatgaggatctacac

SEQ ID NO: 4472 - DNA, 705 bp, Homo Sapiens
ctcatcattggctttggtatttcagggagacactccatcacagtcactactgtcgcctcagctgggaacattggggaggatggaatcctgagctgcacttttgaacctgacatcaaactttctgatatcgtgatacaatggctgaaggaaggtgttttaggcttggtccatgagttcaaagaaggcaaagatgagctgtcggagcaggatgaaatgttcagaggccggacagcagtgtttgctgatcaagtgatagttggcaatgcctctttgcggctgaaaaacgtgcaactcacagatgctggcacctacaaatgttatatcatcacttctaaaggcaaggggaatgctaaccttgagtataaaactggagccttcagcatgccggaagtgaatgtggactataatgccagctcagagaccttgcggtgtgaggctccccgatggttcccccagcccacagtggtctgggcatcccaagttgaccagggagccaacttctcggaagtctccaataccagctttgagctgaactctgagaatgtgaccatgaaggttgtgtctgtgctctacaatgttacgatcaacaacacatactcctgtatgattgaaaatgacattgccaaagcaacaggggatatcaaagtgacagaatcggagatcaaaaggcggagtcacctacagctgctaaactcaaaggcttct

SEQ ID NO: 4473 - DNA, 1269 bp, Homo Sapiens
gagcgcggtccaccagcatcagccccccgaggggacctgatgttcctgctggacagctcagccagcgtctctcactacgagttctcccgggttcgggagtttgtggggcagctggtggctccactgcccctgggcaccggggccctgcgtgccagtctggtgcacgtgggcagtcggccatacaccgagttccccttcggccagcacagctcgggtgaggctgcccaggatgcggtgcgtgcttctgcccagcgcatgggtgacacccacactggcctggcgctggtctatgccaaggaacagctgtttgctgaagcatcaggtgcccggccaggggtgcccaaagtgctggtgtgggtgacagatggcggctccagcgaccctgtgggcccccccatgcaggagctcaaggacctgggcgtcaccgtgttcattgtcagcaccggccgaggcaacttcctggagctgtcagccgctgcctcagcccctgccgagaagcacctgcactttgtggacgtggatgacctgcacatcattgtccaagagctgaggggctccattctcgacgcgatgcggccgcagcagctccatgccacggagatcacgtccagcggcttccgcctggcctggccacccctgctgaccgcagactcgggctactatgtgctggagctggtgcccagcgcccagccgggggctgcaagacgccagcagctgccagggaacgccacggactggatctgggccggcctcgacccggacacggactacgacgtggcgctagtgcctgagtccaacgtgcgcctcctgaggccccagatcctgcgggtgcgcacgcggcccggtgaggcagggccgggggcttcgggcccggagtcgggggctgggccggcccccacgcagctcgccgccctccccgccccagaggaggccgggccagagcgcatcgtcatctcccacgcccggccgcgcagcctccgcgtgagttgggccccagcgctgggctcagccgcggcgctcggctaccacgtgcagttcgggccgctgcggggcggggaggcgcagcgggtggaggtgcccgcgggccgcaactgcaccacgctgcagggcctggcgccgggcaccgcctacctggtgaccgtgaccgccgccttccgctcgggccgcgagagcgcgctgtccgccaaggcctgcacgcccgacggcccgcgcccgcgcccacgccccgtgccccgcgccccgaccccggggaccgccagccgtgagccg

SEQ ID NO: 4474 - DNA, 1263 bp, Homo Sapiens
atggaggcacatgtgttccagaaggactggacggctaccagtgcctctgcccgctggcctttggaggggaggctaactgtggtagccctgaagctgagcctggaatgcagggtcgacctcctcttcctgctggacagctctgcgggcaccactctggacggcttcctgcgggccaaagtcttcgtgaagcggtttgtgcgggccgtgctgagcgaggactctcgggcccgagtgggtgtggccacatacagcagggagctgctggtggcggtgcctgtgggggagtaccaggatgtgcctgacctggtctggagcctcgatggcattcccttccgtggtggccccaccctgacgggcagtgccttgcggcaggcggcagagcgtggcttcgggagcgccaccaggacaggccaggaccggccacgtagagtggtggttttgctcactgagtcacactccgaggatgaggttgcgggcccagcgcgtcacgcaagggcgcgagagctgctcctgctgggtgtaggcagtgaggccgtgcgggcagagctggaggagatcacaggcagcccaaagcatgtgatggtctactcggatcctcaggatctgttcaaccaaatccctgagctgcaggggaagctgtgcagccggcagcggccagggtgccggacacaagccctggacctcgtcttcatgttggacacctctgcctcagtagggcccgagaattttgctcagatgcagagctttgtgagaagctgtgccctccagtttgaggtgaaccctgacgtgacacaggtcggcctggtggtgtatggcagccaggtgcagactgccttcgggctggacaccaaacccacccgggctgcgatgctgcgggccattagccaggccccctacctaggtggggtgggctcagccggcaccgccctgctgcacatctatgacaaagtgatgaccgtccagaggggtgcccggcctggtgtccccaaagctgtggtggtgctcacaggcgggagaggcgcagaggatgcagccgttcctgcccagaagctgaggaacaatggcatctctgtcttggtcgtgggcgtggggcctgtcctaagtgagggtctgcggaggcttgcaggtccccgggattccctgatccacgtggcagcttacgccgacctgcggtaccaccaggacgtgctcattgagtggctgtgtggaggtgagtgggggaatccacaccctcagggctgcccccatggcaggccctcagcc

SEQ ID NO: 4475 - DNA, 2802 bp, Homo Sapiens
cgaggctacaccgggaggaagccgcccgggcacttcgcggccgagagacgccgactgggcccccacgtctgcctctctgggtttgggagtggctgctgccctggctgggcgccctctatgggtggtgggcactgcaccctgcccctctgctccttcggctgtgggagtggcatctgcatcgctcccaatgtctgctcctgccaggatggagagcaaggggccacctgcccagaaacccatggaccatgtggggagtacggctgtgaccttacctgcaaccatggaggctgtcaggaggtggcccgagtgtgccccgtgggcttctcgatgacggagacagctgttggcatcaggtgtacagacattgacgaatgtgtaacctcctcctgcgagggccactgtgtgaacacagaaggtgggtttgtgtgcgagtgtgggccgggcatgcagctgtctgccgaccgccacagctgccaagacactgacgaatgcctagggactccctgtcagcagagatgtaaaaacagcattggcagctacaagtgttcctgtcgaactggcttccaccttcatggcaaccggcactcctgtgtagatgtaaacgagtgtcggaggccattggagaggcgagtctgtcaccattcctgccacaacaccgtgggcagcttcctatgcacatgccgacctggcttcaggctccgagctgaccgcgtgtcctgtgaagctttcccgaaagccgtgctggccccatctgccatcctgcaaccccggcaacacccgtccaagatgcttctgttgcttcctgaggccggccggcctgccctgtccccaggacatagccctccttctggggctccagggcccccagccggagtcaggaccacccgcctgccatctcccaccccacgactacccacatcctccccttctgcccctgtgtggctgctgtccaccctgctggccaccccagtgcctactgcctccctgctggggaacctcagacccccctcactccttcagggggaggtgatggggaccccttcctcacccaggggccctgagtccccccgactggcagcagggccctctccctgctggcacctgggagccatgcatgaatcaaggagtcgctggacagagcctgggtgttcccagtgctggtgcgaggacgggaaggtgacctgtgaaaaggtgaggtgtgaagctgcttgttcccacccaattccctccagagatggtgggtgctgcccatcgtgcacaggctgttttcacagtggtgtcgtccgagctgaaggggatgtgttttcacctcccaatgagaactgcaccgtctgtgtctgtctggctggaaacgtgtcctgcatctctcctgagtgtccttctggcccctgtcagacccccccacagacggattgctgtacttgtgttccagtgagatgctatttccacggccggtggtacgcagacggggctgtgttcagtgggggtggtgacgagtgtaccacctgtgtttgccagaatggggaggtggagtgctccttcatgccctgccctgagctggcctgcccccgagaagagtggcggctgggccctgggcagtgttgcttcacctgccaggagcccacaccctcgacaggctgctctcttgacgacaacggggttgagtttccgattggacagatctggtcgcctggtgacccctgtgagttatgcatctgccaggcagatggctcggtgagctgcaagaggacagactgtgtggactcctgccctcacccgatccggatccctggacagtgctgcccagactgttcagcaggctgcacctacacaggcagaatcttctataacaacgagaccttcccgtctgtgctggacccatgtctgagctgcatctgcctgctgggctcagtggcctgttcccccgtggactgccccatcacctgtacctaccctttccaccctgacggggagtgctgccccgtgtgccgagactgcaactacgagggaaggaaggtggcgaatggccaggtgttcaccttggatgatgaaccctgcacccggtgcacgtgccagctgggagaggtgagctgtgagaaggttccctgccagcgggcctgtgccgaccctgccctgcttcctggggactgctgctcttcctgtccagattccctgtctcctctggaagaaaagcaggggctctcccctcacggaaatgtggcattcagcaaagctggtcggagcctgcatggagacactgaggcccctgtcaactgtagctcctgtcctgggcccccgacagcatcaccctcgaggccggtgcttcatctcctccagctccttttaagaacgaacttgatgaaaacacagactttacctacaagcccggcaggagctcatggtccacactcactcgctttggggctgacagccactttcccaggggagcctggggcctcccctcgactctcaccagggccttcgacccctccaggagcccccactctacctctagcttccccaggggctcctcagccacctcctgtgactccagagcgctcgttctcagcctctggggcccagatagtgtccaggtggcctcctctgcctggcaccctcctgacggaagcttcagcactttccatgatggaccccagcccctcgaagacccccatcaccctcctcgggcctcgcgtgctttctcccaccacctctagactctccacagcccttgcagccaccacccaccctggcccccagcagcccccagtgggggcttctcggggggaagagtccaccatg

SEQ ID NO: 4476 - DNA, 1587 bp, Homo Sapiens
gctggcttgctgccagggctggggagccacccgggcgtgtgccccaaccagctcagccccaacctgtgggtggacgcccagagcacctgtgagcgcgagtgtagcagggaccaggactgtgcggctgctgagaagtgctgcatcaacgtgtgtggactgcacagctgcgtggcagcacgcttccccggcagcccagctgcgccgacgacagcggcctcctgcgagggctttgtgtgcccacagcagggctcggactgcgacatctgggacgggcagcccgtgtgccgctgccgcgaccgctgtgagaaggagcccagcttcacctgcgcctcggacggcctcacctactacaaccgctgctatatggacgccgaggcctgcctgcggggcctgcacctccacatcgtgccctgcaagcacgtgctcagctggccgcccagcagcccggggccgccggagaccactgcccgccccacacctggggccgcgcccgtgcctcctgccctgtacagcagcccctccccacaggcggtgcaggttgggggtacggccagcctccactgcgacgtcagcggccgcccgccgcctgctgtgacctgggagaagcagagtcaccagcgagagaacctgatcatgcgccctgatcagatgtatggcaacgtggtggtcaccagcatcgggcagctggtgctctacaacgcgcggcccgaagacgccggcctgtacacctgcaccgcgcgcaacgctgctgggctgctgcgggctgacttcccactctctgtggtccagcgagagccggccagggacgcagcccccagcatcccagccccggccgagtgcctgccggatgtgcaggcctgcacgggccccacttccccacaccttgtcctctggcactacgacccgcagcggggcggctgcatgaccttcccggcccgtggctgtgatggggcggcccgcggctttgagacctacgaggcatgccagcaggcctgtgcccgcggccccggcgacgcctgcgtgctgcctgccgtgcagggcccctgccggggctgggagccgcgctgggcctacagcccgctgctgcagcagtgccatcccttcgtgtacggtggctgcgagggcaacggcaacaacttccacagccgcgagagctgcgaggatgcctgccccgtgccgcgcacaccgccctgccgcgcctgccgcctccggagcaagctggcgctgagcctgtgccgcagcgacttcgccatcgtggggcggctcacggaggtgctggaggagcccgaggccgccggcggcatcgcccgcgtggcgctcgaggacgtgctcaaggatgacaagatgggcctcaagttcttgggcaccaagtacctggaggtgacgctgagtggcatggactgggcctgcccctgccccaacatgacggcgggcgacgggccgctggtcatcatgggtgaggtgcgcgatggcgtggccgtgctggacgccggcagctacgtccgcgccgccagcgagaagcgcgtcaagaagatcttggagctgctggagaagcaggcctgcgagctgctcaaccgcttccaggac

SEQ ID NO: 4477 - DNA, 1626 bp, Homo Sapiens
ctgccgcccatccgctattcccacgccggcatctgccccaacgacatgaatcccaacctctgggtggacgcacagagcacctgcaggcgggagtgtgagacggaccaggagtgtgagacctatgagaagtgctgccccaacgtatgtgggaccaagagctgcgtggcggcccgctacatggacgtgaaagggaagaagggcccagtgggcatgcccaaggaggccacatgtgaccacttcatgtgtctgcagcagggctctgagtgtgacatctgggatggccagcccgtgtgtaagtgcaaagaccgctgtgagaaggagcccagctttacctgcgcctcggacggcctcacctactataaccgctgctacatggatgccgaggcctgctccaaaggcatcacactggccgttgtaacctgccgctatcacttcacctggcccaacaccagccccccaccacctgagaccaccatgcaccccaccacagcctccccagagacccctgagctggacatggcggcccctgcgctgctcaacaaccctgtgcaccagtcggtcaccatgggtgagacagtgagcttcctctgtgatgtggtgggccggccccggcctgagatcacctgggagaagcagttggaggatcgggagaatgtggtcatgcggcccaaccatgtgcgtggcaacgtggtggtcaccaacattgcccagctggtcatctataacgcccagctgcaggatgctgggatctacacctgcacggcccggaacgtggctggggtcctgagggctgatttcccgctgtcggtggtcaggggtcatcaggctgcagccacctcagagagcagccccaatggcacggctttcccggcggccgagtgcctgaagccccccgacagtgaggactgtggcgaagagcagacccgctggcacttcgatgcccaggccaacaactgcctgaccttcaccttcggccactgccaccgtaacctcaaccactttgagacctatgaggcctgcatgctggcctgcatgagcgggccgctggccgcgtgcagcctgcccgccctgcaggggccctgcaaagcctacgcgcctcgctgggcttacaacagccagacgggccagtgccagtcctttgtctatggtggctgcgagggcaatggcaacaactttgagagccgtgaggcctgtgaggagtcgtgccccttccccagggggaaccagcgctgtcgggcctgcaagcctcggcagaagctcgttaccagcttctgtcgcagcgactttgtcatcctgggccgagtctctgagctgaccgaggagcctgactcgggccgcgccctggtgactgtggatgaggtcctaaaggatgagaaaatgggcctcaagttcctgggccaggagccattggaggtcactctgcttcacgtggactgggcatgcccctgccccaacgtgaccgtgagcgagatgccgctcatcatcatgggggaggtggacggcggcatggccatgctgcgccccgatagctttgtgggcgcatcgagtgcccgccgggtcaggaagcttcgtgaggtcatgcacaagaagacctgtgacgtcctcaaggagtttcttggcttgcac

SEQ ID NO: 4478 - DNA, 1053 bp, Homo Sapiens
gggccgccgcaggaggagagcctgtacctatggatcgatgctcaccaggcaagagtactcataggatttgaagaagatatcctgattgtttcggaggggaaaatggcaccttttacacatgatttcagaaaagcgcaacagagaatgccagctattcctgtcaatatccattccatgaattttacctggcaagctgcagggcaggcagaatacttctatgaattcctgtccttgcgctccctggataaaggcatcatggcagatccaaccgtcaatgtccctctgctgggaacagtgcctcacaaggcatcagttgttcaagttggtttcccatgtcttggaaaacaggatggggtggcagcatttgaagtggatgtgattgttatgaattctgaaggcaacaccattctcaaaacacctcaaaatgctatcttctttaaaacatgtcaacaagctgagtgcccaggcgggtgccgaaatggaggcttttgtaatgaaagacgcatctgcgagtgtcctgatgggttccacggacctcactgtgagaaagccctttgtaccccacgatgtatgaatggtggactttgtgtgactcctggtttctgcatctgcccacctggattctatggagtgaactgtgacaaagcaaactgctcaaccacctgctttaatggagggacctgtttctaccctggaaaatgtatttgccctccaggactagagggagagcagtgtgaaatcagcaaatgcccacaaccctgtcgaaatggaggtaaatgcattggtaaaagcaaatgtaagtgttccaaaggttaccagggagacctctgttcaaagcctgtctgcgagcctggctgtggtgcacatggaacctgccatgaacccaacaaatgccaatgtcaagaaggttggcatggaagacactgcaataaaaggtacgaagccagcctcatacatgccctgaggccagcaggcgcccagctcaggcagcacacgccttcacttaaaaaggccgaggagcggcgggatccacctgaatccaattacatctgg

SEQ ID NO: 4479 - DNA, 279 bp, Homo Sapiens
gtagggagtgaagtctcagataagaggacctgtgtgagcctcactacccagcgactgccggttagcagaatcaagacctacaccatcacggaaggctccttgagagcagtaatttttattaccaaacgtggcctaaaagtctgtgctgatccacaagccacatgggtgagagacgtggtcaggagcatggacaggaaatccaacaccagaaataacatgatccagaccaagccaacaggaacccagcaatcgaccaatacagctgtgactctgactggc

SEQ ID NO: 4480 - DNA, 279 bp, Homo Sapiens
gtagggagtgaagtctcacataggaggacctgtgtgagcctcactacccagcgactgccagttagcagaatcaagacctacaccatcacggaaggctccttgagagcagtaatttttattaccaaacgtggcctaaaagtctgtgctgatccacaagccacgtgggtgagagacgtggtcaggagcatggacaggaaatccaacaccagaaataacatgatccagaccaagccaacaggaacccagcaatcgaccaatacagctgtgaccctgactggc

SEQ ID NO: 4481 - DNA, 921 bp, Homo Sapiens
cacttggttcgattaccaagagcttttcgcttgaccaaagattcagtgaaaatagtgggatcaacaagttttccagtgaaagcgtatgtcatgctccatcaaaagagtccacacgtgttatgtgtaacgcaacaactgcgaaatgctgaactgatagacccatcattccaatggtatgggcctaaaggaaaagttgtttcagtagaaaaccgcactgcacaaataacatccacaggaagccttgtattccaaaattttgaggagagtatgagtggaatttatacatgtttcctcgaatataaacctactgtggaagaaattgttaaacgtcttcaactaaaatatgctatatatgcttatcgtgagcctcattattattatcagttcacagctcgatatcatgcagctccctgcaatagcatttataatatttcttttgagaagaaacttcttcagattttaagcaaactgcttcttgacctttcatgtgaaatttccttacttaagtctgaatgccatcgcgttaaaatgcaaagagctggtttgcaaaatgaattgttctttgcattttcagtttcatctctagacactgaaaaaggacccaagcgatgtacagaccataactgtgaaccttacaaaagactttttaaggctaaaaatctcatagagagattttttaatcaacaagtagaaattcttggcagacgtgcagaacaattacctcaaatatactatattgaaggtactctccaaatggtttggattaatcgctgctttccaggatatggaatgaatgtccagcaacatccaaaatgtcctgagtgctgtgtgatctgcagccctggatcatataacccccgtgatggaattcattgccttcaatgcaatagcagcctggtgtatggagcaaaaacgtgctta

SEQ ID NO: 4482 - DNA, 897 bp, Homo Sapiens
gacaaaatatatgtagagttacatcaaaatagtccagtccttatctgtatggattttaagctttctaaaaaagaaatagtggaccccacctacttatggattgggcctaatgaaaagacgttaacaggaaataatagaataaatataactgaaactggacagctgatggtgaaagattttttggagcctttgtctggactttacacatgtactctttcttataagactgttaaagcagaaactcaagaagaaaaaacagtcaaaaagagatatgactttatggtctttgcctatcgggaacctgattattcatatcagatggctgtacgttttaccacaaggtcttgtatagggagatacaatgatgtattctttagagtgctgaagaaaatcttggatagtctaatttctgatttgtcatgccatgtcatagagccatcatataaatgccattctgttgaaattccagaacatggcctcatacatgagctatttatagcatttcaagttaatccttttgcgccggggtggaaaggtgcttgcaatggatctgttgactgtgaagataccactaatcataatatcctccaggcaagagatcgaatagaagacttttttcggagccaagcatatattttctaccataactttaataaaactctaccagcaatgcattttgtggaccacagtttgcaagtagtacgtctggatagctgtcgaccaggctttggaaaaaatgaacgtctacacagtaattgcgctagctgttgtgtggtttgtagtcctgcgacttttagtcctgatgttaatgtaacttgtcagacctgcgtttccgtccttacctatggagctaaatcttgcccacaaacttcaaacaaaaatcagcaatatgaagat

SEQ ID NO: 4483 - DNA, 930 bp, Homo Sapiens
atgaacggtctgtctttgtcagagctgtgttgcctgttctgttgtccaccctgtcccggaaggatagctgccaaactggccttcctgcctccggaggcaacatattccctggttcctgaacccgaacctggtcccggaggagctggggccgcccccctgggtacacttagggccagctccggtgctcctggccggtggaaattgcacttgaccgagcgagcagactttcagtacagccaacgcgaactggacactattgaagtcttccccaccaagtctgcacggggtaacagggtttcatgcatgtacgtgagatgcgtacctggcgcaagatatacagtgttgttttcccatggcaacgccgttgacctgggtcagatgagttctttctacattggactcggtagcaggctgcactgcaatattttttcatacgattactctggctatggagcctccagtgggcggccatctgaacgaaatttatacgccgatatcgacgccgcttggcaggccctccggacaagatatggcatcagcccggactccattattctctatgggcagagtattggtaccgttccaacagtagatttggcgtctcggtacgaatgtgccgctgtcgtcctgcactctcccctcacctctggcatgcgcgtcgccttcccggatactaaaaaaacttactgctttgacgcattcccgaatatcgaaaaggttagtaagattacaagtccggttctcataatccacggtacagaggatgaagtgatagacttttcccacggtctcgctctgtatgagaggtgtcccaaagcagtggagccgctgtgggtcgaaggtgccgggcacaacgatatcgaactgtatagccagtatctggagcgacttcggagatttatatcacaggaattaccctcccagagggct

SEQ ID NO: 4484 - DNA, 864 bp, Homo Sapiens
atgaacaatctctcattcagcgaactgtgttgtctgttttgctgccccccctgtccagggaagattgcgtccaaactggcttttctgcctcccgacccgacctacactctgatgtgtgacgaaagtggttcccgctggacactgcacctcagtgaacgggctgactggcaatacagctctcgagaaaaagatgccatcgagtgttttatgaccagaaccagcaaggggaataggatcgcctgtatgttcgtcagatgctccccgaacgccaagtacacactgctcttttcccacggaaacgccgtggatctggggcagatgtccagcttttacattgggctcggaagccgtatcaattgtaacattttcagttacgactactcaggctatggtgcctcaagcggcaaaccaaccgagaagaacctctacgcggacatcgaggcagcttggctggctctgagaactcgctatgggatccgccccgagaacgtaattatctacggccaatccatcgggaccgtaccaagtgttgacttggcagccagatacgaatcagccgcggtcattctccattctccattgactagtggcatgagagttgcgtttccagataccaagaagacgtattgttttgatgccttccctaatatagacaaaattagcaaaatcacttctcccgtcctcatcatacacggaacggaagacgaagttatagacttctcccacggcctcgcccttttcgaacgatgtcagagacccgtggagcctctgtgggtggaaggagcagggcataatgatgtggagctgtacgggcaataccttgagcgactgaagcagttcgtgagccaggaactggttaacttg

SEQ ID NO: 4485 - DNA, 1170 bp, Homo Sapiens
aggccagaggacctgaaacgcctgttcgagtttcgtaagatgatcggtaaccgcgaacgatgccaaaacttggtgagcagtgattatccagtccacatcgacaagattgaggagcagtcagactgcaaaatcctcgacggtcattttgtgtcccccatggcccactatgtacctgacatcatgccaattgaatccgtaatcgcccggttccagtttattgtgcccaaggagtggaattccaagtaccggcccgtatgcattcacctggcgggaacaggcgatcaccactattggcgcagacggacccttatggcacgcccaatgattaaggaggcgcgtatggcctcacttcttctggagaacccgtattatgggtgcagaaagcccaaggatcaggtccgttccagtttaaagaacgtttctgatctgtttgtgatgggtggtgcccttgtgttagagtccgctgctcttctgcattggctcgagagggaaggatacgggccactcggaatgaccggaatcagcatgggaggacatatggctagcttagcggtgtctaactggccgaagcccatgcccctcataccatgtctgagttggagtaccgcaagcggagtgttcaccacaaccgacagttttaagatgggtcaggagttcgtcaagcatttcacatcttccgctgacaagcttactaacctgaacctggtttcccgcactctcaatctcgacatttccaaccaagttgtctcacaaaagccggctgattgccacaatagtagcaaaacttccgtctccgccacaagtgaggggctcttactgcaggatacaagtaaaatgaagaggtttaatcagaccctcagcacaaacaagtctggatacacttcaaggaaccctcagtcataccatctgctgagcaaggaacagtcccggaactccctgagaaaggagtcactgatcttcatgaagggtgtgatggacgagtgcacccacgttgcaaatttctcagtaccagtggatccaagtctgattattgttgttcaggctaaggaggacgcttacatccctaggaccggggtccggtctctgcaggagatatggcccgggtgtgagatcagataccttgagggcggacatatctctgcttacttgtttaaacagggactgttcagg

SEQ ID NO: 4486 - DNA, 567 bp, Homo Sapiens
gcgtcatggacatctcgtcaggtaggagaacggacacttaccggcattgtaatagactcaggcgatggagtgacccacgtgattcctgtggcagaaggttatgttattggcagctgtattaagcacatccctattgctggccgggacatcacatattttatccagcaactgctgcgcgagagggaggtgggcattcccccagaacaatctctggagactgccaaggcgattaaagagaagtactgctatatctgtcctgatatcgtgaaagagtttgccaaatatgacgtggaccctcagaaatggattaaacaatacacagggattaatgccatcaatcaaaaaaagttcgtgatagatgtcggctacgagcggtttctgggtcccgagatcttttttcacccagaattcgccaaccctgattccatggaatctatcagtgatgtagtggacgaagttatacaaaactgccccattgacgtccggcgccccttgtataaaatggaacagattcctctgtcatacccacagggccacggctttcatccattatccccaccgttccac

SEQ ID NO: 4487 - DNA, 795 bp, Homo Sapiens
aaaagccccgagaaagaggattttcttcgcgctcaaaagtacatcgacctgtaccttgtcctcgataatgcgttctataagaactacaacgagaatcttacgctgatccgcagtttcgtatttgacgtgatgaacctcctcaacgttatttacaataccatcgacgtccaagtggccctcgtgggcatggagatttggtctgacggcgacaaaattaaggtggtgcctagtgcctctaccacctttgataattttctgcggtggcacagctctaacctggggaaaaaaattcatgatcatgcgcaattgctcagcgggatctccttcaataatcgaagagtgggtctcgccgcttccaatagtttatgcagccctagttctgtcgccgtgatcgaagccaaaaagaagaacaacgtggccttggtgggtgtgatgagtcacgagttgggccatgtcctcggcatgccagatgtgccattcaatactaagtgtcccagtggttcttgcgtgatgaatcagtatctgtcttctaagttcccaaaagacttcagcactagctgtagggctcactttgagaggtatctgctgagccagaagcccaagtgcttgctccaggcccccatcccaaccaacataatgacgacacctgtgtgtgggaaccatctcttagaagtgggcgaggattgcgactgcggaagtcccaaagagtgcacgaacctttgctgcgaggcactgacctgcaagcttaagccaggaactgactgtgggggtgacgcccctaaccacacgacggaa

SEQ ID NO: 4488 - DNA, 1317 bp, Homo Sapiens
caaggaccaggagagtggaccccatgggtgagctggaccagatgcagttcctcctgcggcaggggcgtgagcgttcggagccgtaggtgcctccggctcccgggagaggaaccctgctggggcgatagccacgaatatcgtctgtgccagcttcccgactgtccacctggcgcagttccttttagagacctgcagtgtgctctgtacaacggcaggcccgtcctcggtactcagaaaacataccagtgggtgccattccacggggcgcctaaccagtgcgatctcaattgcttagctgaggggcatgctttctaccactcctttggcagggttctggatgggaccgcttgttctcctggagcccaaggcgtgtgtgtggctgggcgatgtctctctgctggatgcgatgggctgttaggctccggcgccctggaggatagatgtggacggtgcgggggcgctaatgattcctgtttatttgtgcaacgcgtttttcgggatgcaggcgcattcgctggatattggaacgttacactcatacccgagggcgctaggcatatccgggtcgagcacaggtctagaaaccatttggctctgatgggcggggacgggcggtatgtgcttaacggacactgggtagtgagcccccctggcacatatgaggccgcaggaacgcacgtcgtgtatactagggacacaggtcctcaggaaacactccaggctgccggaccgacatctcatgatttgctcctccaggtccttctccaggaacctaaccccggaatagagtttgagttctggctgccgcgagagcgctatagccctttccaggcgagagtgcaagccctggggtggccactgcgccagccacaacctcgcggtgtggagccacagccgccagcagcccccgctgtaacgcccgcacaaactccaacactcgctcccgatccctgcccaccatgtccggatacgagaggaagagcccacaggctgctgcactactgcggcagcgactttgtctttcaggcacgtgtgctgggacaccatcaccaagctcaggaaacacgatatgaagtgcggatccagttggtgtacaaaaataggtctcctctgcgggctcgcgaatacgtatgggctcccggacactgtccttgccccatgctcgcaccacaccgggactacttgatggccgtgcagcgactcgtctcccctgatggcacccaggatcagctgctcctcccacatgcaggctatgcccgaccatggagtccagctgaggacagtcgcatccgcctgacggcccgacggtgtcctgga

SEQ ID NO: 4489 - DNA, 846 bp, Homo Sapiens
atgtggatccagcagttactcggcttgtcatccatgagtatcaggtggccaggcaggcccttaggctctcatgcttggatcctcatcgcaatgttccaactggctgtagatctgcctgcatgtgaggcattaggaccaggtcctgaattttggcttctgcctagatctccgccgcggccgcccaggttgtggagttttaggagcggtcaacctgctagagtccctgcccccgtctggtcaccccggccacccagagtagaaaggatccatggacagatgcagatgccccgcgctcggcgtgcgcaccgcccccgggaccaggccgctgctctcgtgccaaaagctgggctcgctaagcctcctgccgccgcaaaatcttctccttcactcgcttcttcatcatcctcatcttcttctgcggtggccgggggggcccccgagcagcaagccctccttcgccgcggcaagaggcatctgcagggcgacggcctgtcttcatttgactctcggggctcccggcctaccacagaaacagaattcatagcgtggggcccaaccggggacgaggaagccttagagagtaacactttccccggggtgtacggcccaactaccgtgtcaatcttgcagacacgtaaaactaccgttgccgccacaaccaccactactacgactgcgacacctatgactctccaaaccaaagggttcactgagagtctcgacccacgtcgccgcattcccggaggggtgagcactaccgaaccaagcacttctccgtccaataacggtgaggtcacccaacccccgaggatcctgggggaggcgagcgggctggcggtgcaccag

SEQ ID NO: 4490 - DNA, 384 bp, Homo Sapiens
ggcgctgagcctcgagagcctgccgatgggcaggcgctgctgagattggtggtggagctggtgcaggaactgcgtaaacaccactctgccgaacataaggggttgcagttgctcggtagggactgcgccttagggcgagcggaagcagccggcttagggcctagtccggagcagagggtagagattgttccgagggacctcaggatgaaggacaaatttctgaagcacttaaccgggcccctttatttttccccaaaatgctctaaacattttcatcgactgtatcacaatactagagattgtacgatccctgcctactacaaacgctgtgctagactgctgacacggctggcggtcagtcctgtgtgtatggaagataagcaa

SEQ ID NO: 4491 - DNA, 1605 bp, Homo Sapiens
cgggcagaagaaccagcagtaggaacatccggtctgatttttagggaagacctggattggccacccgggtctccccaagagcccttgtgcttagtagcactgggtggggacagcaatggttctagtagccccttgcgcgtggtgggagctctgagcgcctacgagcaggcttttctgggtgccgttcaaagagcgcgatggggtccgagggatctggcaacattcggggtctgcaataccggcgaccggcaggcagccttgcctagcctccggcggcttggagcctggcttcgtgatcccggaggtcagagactggtggtgctgcatctggaggaggttacctgggaacctacgccttcactgagattccaagagccgccacccggaggggcaggtccccccgaactggctctgttagtgttatatcccggacccgggcctgaggtaacggtgaccagagcaggccttcctggagcacagtccttgtgtccttctcgagatacccgttacctcgttttggcggttgataggcctgctggtgcctggaggggctctggtctggccctcactttacagccgcgcggggaagactcacggctctccacggctagactgcaggccctgctttttggggatgaccacaggtgtttcaccaggatgacaccagccctgctgctgctgcctagatctgagcccgctcccttacccgcacacggccagctggataccgtccccttcccgcctccgaggccttctgctgagcttgaggagagccccccatcagctgacccatttcttgagacactcactaggctggtgagagccctcagggtgccccccgccagggcatccgcgccaaggctggcactggatccggatgccctggctggtttccctcaggggctcgtaaatctgagcgacccagccgcgctcgagcggttgttagacggcgaagaacccctgcttctcctgcttagaccaaccgcggctaccaccggggatccagctcccctgcatgaccctacatccgcaccctgggccacagccctggctcggcgcgtggcggcggagttgcaggcagccgccgctgaactgcgcagtcttcccggccttcctcctgccactgctcctctgctggcccggctgctggcactgtgcccaggagggcctggggggctcggagatcctctcagagccctgctgctccttaaagcactgcagggtcttcgggtagagtggcgtggtcgtgacccgcgggggcctgggcgtgcgcagaggagcgcaggtgctacagccgcagatggcccgtgcgctctgagggaactttccgtcgacctgagggccgagcgaagcgtgttgattccagagacttaccaggccaacaactgccagggggtctgtgggtggcctcagagtgacagaaatccaaggtatgggaatcacgtggtgcttctcctgaagatgcaggttcggggcgccgccctggcccggcccccttgctgcgtgccaactgcttacgcagggaagctcttgataagtttgtcagaagaaagaattagcgctcaccacgtccccaacatggtggccaccgagtgcggctgcaga

SEQ ID NO: 4492 - DNA, 1014 bp, Homo Sapiens
gtcagtaagctctgggtcccaaacacagacttcgacgtagccgctaattggtctcagaacagaacgccatgtgccggcggggccgtcgagttcccagccgataaaatggtgtccgttctcgtccaagaaggccacgcggtttcagacatgctgctcccattggacggcgagctggtcctcgcatcaggtgccggatttggggtaagcgatgtaggaagtcaccttgattgcggcgccggcgagcctgcagtctttcgtgactcagatcggttttcttggcacgacccacacctctggcgaagtggtgatgaggcccctggcttgttcttcgtggatgcagaacgcgtcccatgtcgccacgacgatgtgttcttcccacctagcgcatcctttcgagtcggattaggtcctggggcctcccctgtcagggtccgttccatctcagcgttaggtcgaacgtttacaagggacgaagatctcgcagtctttctggctagccgtgccgggcggttaagatttcacggtcccggagcactctcagtaggtcccgaggactgcgccgacccatctggctgtgtctgcggtaatgccgaggctcagccatggatctgcgctgctctgctgcaacccctcggcggccgctgccctcaagctgcttgccatagcgcgctgcggcctcaggggcagtgctgcgatttatgcggagccgtagtgctgctgactcatggcccggctttcgacctcgagaggtaccgggcaaggatcctggatacattccttgggttacctcagtaccacggactgcaggtcgcggtttcaaaagtgccgaggtcatctcggttgcgtgaggccgacaccgagattcaggtcgtgctggtggaaaacgggcccgaaacaggtggcgcaggcaggcttgctcgggctctgctggccgacgtcgcagagaatggcgaggctctgggggtgctggaagcgactatgcgcgaatcaggcgctcacgtctggggatctagc

SEQ ID NO: 4493 - DNA, 1488 bp, Homo Sapiens
cagtatagccctaatacgcaacaggggagaacgtctatagtccacctgttcgagtggcgctgggtcgacatagccctcgaatgcgaaaggtacctggccccgaaaggatttggcggggtgcaggtttccccgcctaacgaaaatgtggccatctacaatccatttcgtccctggtgggagcgctatcaacctgtgagttataagttgtgcactaggagcgggaatgaggatgaattccggaacatggtgacgcgctgcaataatgtaggtgtacgcatatatgtggacgccgtgataaatcatatgtgcggaaatgctgtgtcagcaggtacaagttccacttgtggttcctactttaaccctgggagcagagacttccctgctgtgccctactctggctgggatttcaatgatgggaagtgcaagaccggtagtggcgacatagaaaactataacgacgcaacacaggtccgcgattgtcggttgacaggcctcttggatctcgctctggagaaagactatgtgcggtcaaaaattgccgaatacatgaaccacctgatcgacatcggtgtagctggctttcggctggatgcatccaagcacatgtggcccggggatatcaaagccatccttgataaactgcacaatctcaattccaattggtttccggccggatccaaaccttttatttaccaagaagtgatcgatttggggggggagcctataaagagcagcgattatttcggcaatgggagagttacagaatttaaatatggcgccaagcttggcaccgtaattagaaagtggaatggtgagaagatgtcatacctgaaaaactggggagaggggtggggattcgtgccctccgatagagcccttgttttcgttgacaatcatgataatcagcgcgggcacggagctggaggcgcatcaattctcactttttgggatgcccgactctataaaatggccgtggggttcatgctggctcacccatatggattcaccagagttatgtcctcctaccgctggcctcgccagttccagaacggtaacgatgtgaatgactgggtgggcccccctaataataatggagtgatcaaggaggtcaccatcaaccctgataccacgtgtggcaatgattgggtctgcgagcaccggtggcggcaaatcagaaatatggtcatcttcagaaacgtggtcgacggccaacccttcactaactggtacgacaatggaagcaaccaagtagctttcgggagggggaatcggggttttattgtgtttaataacgacgattggagcttcagtctgacactccagacgggacttcccgccggaacgtattgcgacgtgatctctggagataaaattaatggtaactgtacaggcataaaaatttacgtgagcgacgacggtaaagctcacttttctatttccaactcagccgaagaccccttcatagcaatacatgctgagtccaagctc

SEQ ID NO: 4494 - DNA, 1488 bp, Homo Sapiens
caatatagcccaaatacacaacaggggaggaccagcattgttcacctcttcgaatggaggtgggtggacatcgctctggaatgcgagagatatctcgcccctaaggggtttggaggcgtccaagtttcacctccgaacgagaacgtagccatacataatcctttcaggccctggtgggagaggtatcagccagtcagctataagctctgcacacggtccggaaacgaagatgagtttcgaaacatggtgacaaggtgcaacaatgtgggcgtgcggatctatgtagatgccgttatcaaccatatgtctgggaatgctgtgtcagccggcacctcttctacctgcggtagttatttcaacccaggctcccgtgacttccctgccgttccctacagcggttgggacttcaatgatgggaaatgtaaaactggctccggcgacatcgagaattacaacgatgctacacaggttcgcgactgtcgattagtcggactgctggatctggccttagagaaggattacgtgcgcagtaagatcgccgaatatatgaaccacttaatcgatatcggggtcgctgggtttcgccttgatgcctcaaagcacatgtggccaggggacatcaaggcgatcttggacaaactccacaatttgaacagtaattggttcccagccggaagcaaacctttcatctaccaggaggtgatcgatcttggcggagagcccataaaaagctccgattacttcggcaacggccgagtgactgaattcaagtacggggcaaagctgggaaccgttattcgtaaatggaatggagagaagatgtcctatcttaagaattggggcgaaggttggggattcatgcccagtgacagggccctcgttttcgtggacaaccacgataatcagagggggcacggagcgggaggggcatccattttgactttctgggatgcaaggctgtacaagatggccgtcggattcatgttagcacacccatacggcttcacgcgagtcatgagcagttacaggtggccccggcagttccagaacggaaatgatgtcaacgattgggtggggcctccaaataacaatggagtgattaaagaggttacaatcaaccccgacacaacctgcggtaacgattgggtttgcgaacataggtggcgccagatccgaaatatggtaaatttccggaacgtggtggacgggcagccttttactaattggtacgataacggaagtaaccaagttgcgttcggccggggcaaccgaggtttcatagttttcaacaatgacgactggaccttctcattaacactgcagaccgggttaccggctggcacctactgcgatgtgatttcaggcgacaagattaacggcaattgtacaggaatcaaaatctacgtgagcgacgacggcaaagctcacttcagcatctctaacagtgccgaggacccttttattgccatccacgccgaatcaaaactg

SEQ ID NO: 4495 - DNA, 1404 bp, Homo Sapiens
ggtcagtttaaaataaaaaagatcaatcagaggcgataccccagagctacagacgggaaggaagaggccaaaaaatgcgcgtacacttttcttgtgcccgaacagcggatcactggacccatctgcgtcaatacaaaaggacaagatgccagtactatcaaggatatgattactagaatggatctggaaaatttgaaagatgtgttgtcccggcagaaacgcgagatcgacgtgctccagctggtggtagacgtggacggaaatatcgtgaacgaggtgaagcttctgaggaaagagtcacggaacatgaatagtcgagtcacccagctgtacatgcagctgctgcacgagatcattagaaaacgcgataattctctggagctgtcccaactggagaacaaaatattgaatgtcactacggagatgctgaaaatggctacacgctatagggaattagaggtaaaatacgcctccttgaccgacctcgtgaacaatcaatccgtgatgatcaccctgctggaggaacagtgtctcagaatttttagcaggcaggacacgcatgtctcacccccactcgtgcaagtagtgccacagcacattcccaattcccaacagtatacgcccggactcctggggggaaacgaaatccagagggaccctggttacccccgcgacctgatgcccccacctgatctcgctacttccccaacgaaatcaccatttaagatccctcccgtgacgtttattaatgaagggcccttcaaagattgtcagcaggcgaaggaagcagggcacagcgtctccggtatctatatgatcaaacctgagaacagtaacggcccaatgcagctctggtgtgaaaactccctggaccctggaggatggaccgtgattcaaaagaggaccgacggaagcgttaattttttcaggaattgggaaaattataagaagggtttcggcaacatcgacggggagtactggctcggcctcgagaacatttacatgttgtctaatcaagacaattataagttgctgatcgagctcgaagactggtctgataagaaggtgtatgccgaatattcaagctttagattggagcctgagtcagaattttatcggctgcgcctcggcacctatcagggtaatgccggggactccatgatgtggcacaatggtaaacagtttaccacattggatagggacaaagacatgtatgccggcaactgcgctcacttccataagggcgggtggtggtataacgcctgtgctcatagtaatcttaacggcgtttggtaccggggaggtcactatcggtccaaacaccaggacggcattttttgggcagagtatagaggaggtagctatagtctcagggctgtgcagatgatgattaaacccatcgac

SEQ ID NO: 4496 - DNA, 1089 bp, Homo Sapiens
aattgcgtgcatcacagcaccgactctagtgttgtcaacatcgtcgaagatggtagcaatgccaaggacgagagtaagtcaaacgacactgtgtgcaaggaggattgcgaagagagttgcgacgtgaagactaaaatcacaagagaagaaaaacactttatgtgtagaaacctgcaaaacagcatcgtatcttatacacgcagcactaaaaagctgttaagaaacatgatggatgagcagcaggctagcctggattatctgtccaatcaagttaatgagttaatgaacagggtcttgttactgacgactgaggtgtttcgcaaacaacttgaccccttcccacaccgccctgtgcaaagccatggcctggattgcactgatatcaaggacacaatcggctcagtgaccaagactccaagcggcctgtatataattcacccagagggatcctcatatccttttgaagtgatgtgtgatatggattacaggggaggcgggaggactgtgattcaaaaacgcattgacggtatcattgattttcagagattgtggtgcgactacctggacgggttcggggaccttctcggagagttttggttaggcctgaaaaagattttctatattgtgaaccagaagaatactagcttcatgttgtacgtagctttagagtcagaagatgataccctggcttatgcgtcttatgacaatttctggttggaggacgaaacgaggtttttcaagatgcacttgggccggtattctggaaatgccggcgatgcatttagaggtctcaaaaaagaagataaccagaacgcaatgcctttcagtacttccgacgtcgataacgacgggtgcagaccagcctgtttggtgaatgggcagtccgtaaaatcatgctcccacctgcacaacaagacaggctggtggtttaacgagtgtgggctcgccaacctgaacggcatacatcattttagcggcaaattgctggccactggaatccaatggggcacttggaccaaaaacaattcccccgtgaaaatcaagtcagtttccatgaagatacgccgcatgtacaatccctattttaag

SEQ ID NO: 4497 - DNA, 1350 bp, Homo Sapiens
cgagcaggcgctcctcgctgcacctacacgtttgtgttaccgccccagaaattcacaggagccgtgtgctggagcgggcccgcgagtactcgggccacaccagaagccgccaatgcttctgaactcgccgccttgaggatgcgagttggccggcacgaggagctgctccgggagctccagaggttagccgctgctgacggtgccgtcgccggggaggtcagagccttacgaaaggagagccggggactgagcgctcggctgggacagttgagggcgcaactccagcacgaagctggccctggcgcagggccaggggctgacctcggagctgagcctgcggcggcactggctctgctgggcgagcgagtgctgaacgcttctgctgaggcccagcgggctgcagcacgcttccatcagctggacgtcaaattcagggaactggcccagctcgtcactcagcagagcagcctgatcgcacgccttgagaggttatgccctggcggggctggaggacaacagcaggtattacctccgcctccgcttgtccccgtcgtcccagttcgtttggttggatccacctccgacaccagccggatgttggacccagcgcctgaacctcagcgcgatcagacacagcgccagcaagaaccaatggcgagcccgatgcccgcggggcacccagctgtaccgactaaacccgtgggcccctggcaggattgcgccgaagctcgccaggcgggtcacgagcagagcggggtgtacgagctgcgcgtggggaggcatgtagtgtcagtatggtgcgagcaacagctggagggaggcggctggaccgtgatccaaagacgtcaggatggatctgtcaactttttcaccacatggcaacactataaagctgggtttggacgacccgatggcgaatactggctgggattagaacctgtctaccagttgacctcacgcggcgaccatgagctgctggtactgctggaagattggggaggtagaggcgcgagagcacactatgacggttttagtttggagcctgaatctgatcattaccggttgagactgggacaatatcatggggacgcaggcgattccctgagttggcataacgataaaccattcagcaccgtcgacagagatcgagactcttattctggcaattgtgcactgtaccaacgcggcggatggtggtaccacgcctgcgcccattctaatctcaatggcgtttggcaccatggtggtcactataggtcccgctaccaagatggggtgtactgggcagagtttagaggaggtgcctattccttaaggaaggcggcaatgttgatccggcctctcaaactt

SEQ ID NO: 4498 - DNA, 531 bp, Homo Sapiens
gccccaatgggaggaccggaactggcccagcatgaggagctcacacttctctttcacggaacattgcagctcggacaggcgcttaatggtgtgtacagaaccacagagggtcggctcaccaaagctcggaattctctggggctttacgggaggacgatcgaacttctcggccaggaagtctctcggggaagagacgctgcccaggaactgcgagccagtcttctggaaacgcaaatggaggaagacatcctgcagttacaggccgaagcgaccgcagaagtgctcggagaagtggctcaggcacagaaagtcctgagggattcagtgcagcggcttgaggtgcagctgagatcagcatggctcggccccgcatatcgtgaattcgaggtattgaaggcgcatgccgacaagcagtcccacatcctgtgggcactcaccggccacgtgcaaaggcagcgacgcgaaatggtggctcagcagcataggctgcgacaaatccaggagcgtttgcacacagccgccctgccagcg

SEQ ID NO: 4499 - DNA, 1014 bp, Homo Sapiens
agcacagtccacgagattctttgtaagctcagcctggaaggtgatcatagtacaccgccatctgcttacggatccgttaaggcctacacaaactttgatgcagaacgcgacgctttgaatattgaaaccgcaattaaaactaagggtgtcgatgaagttaccatcgttaatattgtgacgaatagggacaatgcccagcggcaggacattgtcttcagttaccaacggcgcaccaaaaaggagctcgcttccgcgctgaagagcgccctgtccggacatttagaaaccgtcatccttggcctccttaagacgcccgctcagtacgatgcaagcgagctgaaggccagcatgaagggcttggggaccgacgaggacagcttaattgaaattatctgctcacgcactaaccaggagttgcaggagataaatcgcgtgtacaaagagatgtataagaccgatctggagaaagacataattagcgacacctccggggattttagaaaattaatggtagccttggctaagggtcggcgcgccgaagacggcagtgtaatcgattatgagcttattgaccaggatgcgcaagacctgtatgacgcgggggtgaaacgcaagggaacagacgtgcctaaatggatcagcatcatgactgagagatctgtaccccatctgcaaaaggtcttcgatcgctataaaagctactctccttacgatatgttagaatcaattaggaaggaggtgaagggggatttagagaatgcctttctcaacctggtccagagaatccagaataaacctctgtatttcgcagaccaactttacgattcaatgaaaggaaagggtacccgggataaggtactgatacgtataatggtttccagaagcgaagtcgacatgttgaaaatccgctccgaatttaagcgtaagtacgggaagtcactgtattattacatccagcaggacactaagggcgattatcagaaggctcttctgtacctgtgtgggggggacgat

SEQ ID NO: 4500 - DNA, 1623 bp, Homo Sapiens
ttgtctaatggccacacttgcgtgggatgcgtgctggtcgtatccgtaattgagcagctggcacaggtgcacaactccactgtccaggctagtatggagcggctgtgcagttatctgcctgagaagctctttcttaagacgacctgctacctggtgattgataaattcggcagcgacatcattaaattgttgagcgctgacatgaacgccgatgtagtctgtcacaccctggagttttgcaaacagaatactgggcaaccactgtgccacctgtaccccctgccaaaagagacctggaagtttaccctgcagaaagcccgccagattgtgaagaaaagccctattctgaaatacagtcgctctggatctgatatatgcagccttcctgtcctggccaaaatatgtcagaagatcaagctggctatggaacagtccgtgcccttcaaagatgtggattcagataagtatagtgttttccccaccctcaggggctaccactggcgagggagagattgtaatgacagcgacgagtctgtatatcccgggcgccgacccaataattgggacgtccaccaggattccaattgcaacggaatttggggagtggaccccaaagatggagttccctacgaaaaaaagttctgtgaggggagccagccgcgggggattattttgttgggcgacagtgcaggtgcccacttccatatctcacctgagtggatcacagcatctcagatgtcccttaattcattcatcaacctgcccacggcgttgactaacgaactcgactggcctcagttatctggtgccacaggcttcctggattcaaccgttggcattaaagagaaaagtatatacttgagactgtggaaaaggaaccactgtaaccatcgggactatcagaacatttcccgaaatggagcatccagccggaacctgaagaaattcatcgaaagcctgtcccggaacaaggttcttgattatcccgctatagtcatctatgccatgatcggcaatgacgtttgtagcggcaaaagtgaccccgtcccagctatgacaacaccagaaaagttatatagcaacgtgatgcagacactgaagcacctgaactcccacttgcctaacggctcccacgttatcctttacggtcttcctgacggcactttcctgtgggacaacctccacaatcggtatcacccattagggcagctgaacaaagatatgacctacgctcagctctacagttttctgaattgtctccaggtcagtccctgccatggttggatgagctctaataagacactgagaacactgacatccgaacgcgctgaacagctttccaatactcttaagaagattgctgcttccgagaagtttaccaatttcaatctgttttatatggattttgcctttcacgaaataatacaggagtggcagaaaagaggcggacaaccttggcagctcattgagccagtggatggctttcatcctaatgaggtggccctcctcctcctcgctgaccacttctggaagaaggtgcagttgcagtggcctcagattttgggcaaagaaaaccccttcaatccacagatcaaacaggtgtttggtgaccagggggggcat

SEQ ID NO: 4501 - DNA, 1368 bp, Homo Sapiens
gaggccggaggatcctgcctcaggtgggaaccccactgccagcaaccgctgcctgatcgtgttccaagcaccgccatcctgccccctaggctgaacgggccctggatatccactggatgtgaggttaggccgggtccggaattcctgactagagcttataccttttaccctagcaggctgtttcgcgcgcatcagttttactacgaggaccccttttgcggcgagccagcgcacagtctcctcgtaaaaggtaaggtccggttgcggcgcgcttcttgggtgactcggggggctacagaggccgactaccacttgcataaagtggggatcgtgttccatagcagacgggccctggtggacgtgaccggccgtctgaatcaaaccagggcagggcgggactgcgcgcggaggttgccaccagcccgggcttggttacccggggccctgtacgagttgaggagcgcacgagctcagggagactgcttggaggctctgggccttaccatgcacgagctgtccctcgtgcgagtgcagcggcgactgcagccgcaaccaagagcctcaccgagactggtggaggagttatacctgggggatatccacacggatcctgcagaaaggcgccattacagacccacagggtaccagcgaccactgcaatctgcgttgcatcatgttcagccatgtccagcatgcggcctgatcgctaggagcgacgtacatcaccctcctgtcctgcctccaccgttggccttgcctttacatttgggcgggtggtgggtaagcagcggctgtgaggtgaggccagctgtgctcttccttacacggttatttactttccatggtcacagtcgcagctgggaaggctattaccatcattttagcgatccagcatgcaggcaacccacgtttaccgtctacgcggctggccgctatactcgggggacaccgtcaacaagggtgcgtggagggaccgaactggtgtttgaagtgactagagcccacgtaacccccatggaccaggtcaccactgcaatgctgaacttttctgagccttccagttgcggtggagcgggcgcttggtccatggggacagaaagagatgtcaccgctaccaacggatgcctgccccttggcatccggctccctcacgtggaatacgaattatttaaaatggagcaggatcctctggggcagagcttattgtttataggacagagacctacagacgggagttcacccgatacccctgagaaaaggcccaccagttaccaggcacctctggtcctgtgccatggggaagcccccgatttctctagaccgccccaacaccggccttcccttcagaagcatccgtctaccggtggg

SEQ ID NO: 4502 - DNA, 1128 bp, Homo Sapiens
gaagtgtcagcagatcaagtggccacggtaatgtgggactattttagccagctgagcaacaatgccaaggaggcagtggaacatttgcagaagtccgaactgacccagcagttgaacgcacttttccaggacaagctcggggaagtgaatacctacgctggggacctgcaaaagaagcttgtgccatttgccaccgaactgcatgaaaggctggccaaagactcagagaagctcaaggaagaaatcgggaaagagctggaggagctgcgagcaaggctgttgcctcatgccaacgaagtgtcccagaagattggagacaacctgagagagctccagcaaagactcgagccatacgccgaccagttaaggacgcaagtcaacacgcaagctgagcagctgagaagacagctcacgccttacgcccagcgtatggaacgcgtcctgagggaaaatgcagactctttacaggcgagtttgagaccgcatgccgacgagctgaaagccaagattgatcagaatgtcgaggaacttaaaggaaggctgactccctacgctgacgagtttaaagtaaagattgatcagacagtcgaggagctgcgccgtagcttggccccatacgctcaggacactcaagaaaaactgaaccatcagttagaaggacttactttccagatgaagaagaacgcagaagagctgaaagctcgaatctcagccagtgctgaggaacttagacagaggttagctccactggctgaggacgtaagaggcaatctgaggggtaataccgagggcctgcagaaatccctggcagagctgggaggacatttggaccagcaggtcgaagagtttcgcagaagagttgaaccatacggtgaaaattttaataaggcactggtccagcagatggaacagctgcgccaaaagctcggacctcacgctggagatgtggaaggccacttgagctttctggagaaggacttgagggacaaagtgaactcatttttctccaccttcaaggagaaggaatcacaggacaaaactctgtccctcccagaattagaacagcagcaagaacagcaacaggaacaacagcaagaacaggtgcagatgctggcgcccctggaatcc

SEQ ID NO: 4503 - DNA, 1491 bp, Homo Sapiens
agcggcgccggcgcatctcggccaccccaccttgtgtttttactggcagacgacctcggatggaacgatgttgggtttcatggtagccggatcagaacgcctcacctcgatgctttggccgcaggaggagtgctgctggataattactacacccaacccctgtgtaccccttcacggagtcagcttctgactggtcggtatcagataaggacggggctgcagcaccagattatttggccttgccagccatcttgcgttccactcgacgagaaactgctgccccagcttctgaaggaagctggctacaccacccacatggttggaaagtggcatctcggcatgtaccgtaaagagtgcctccctacacgcagaggattcgacacttactttggttacttacttggcagtgaagactactacagtcatgaacgctgcactctcatagatgctctgaatgtgacccgatgtgctcttgacttccgggacggggaggaggtcgccaccggctacaaaaatatgtactccaccaatattttcacaaaacgggcgattgccctcatcaccaaccacccccccgagaagcctctgtttctctatctggccttgcaatctgtgcatgagcccctccaggtgcccgaggagtacttaaagccgtatgacttcattcaagacaaaaatcggcaccattatgccggcatggtaagtctcatggacgaagccgtagggaacgtgaccgctgccctcaagtcctccggactgtggaacaacaccgtgttcatcttcagcacagacaacgggggtcagaccttggccggtggcaacaactggccacttcgggggagaaagtggtcattgtgggagggaggcgtcaggggggttggctttgtcgcatcccccctcctcaagcagaagggcgtgaagaaccgggaactgattcacatctccgactggcttccaacattggttaagctggctcggggtcatacaaacggcaccaaacctctggatgggttcgacgtctggaaaacgatctcagaaggtagcccaagtcctagaatagagctgctgcacaacatcgatccaaatttcgtggactccagtccctgccccagaaactcaatggcccccgcgaaggacgacagttccttgcccgagtatagcgctttcaatacaagtgtccatgccgcaatacgccacggcaattggaagcttctgaccgggtatccgggctgtggatattggttcccaccccctagtcaatataatgtcagcgagatccccagtagcgaccctcctactaaaaccctgtggctcttcgacattgaccgcgacccagaggagagacatgacctgtctcgcgagtatccgcatatcgtgaccaaactccttagcagactgcaattttaccacaaacattctgtgccggtgtactttccagcccaggatcccagatgtgatcctaaggcgaccggcgtctggggaccgtggatg

SEQ ID NO: 4504 - DNA, 339 bp, Homo Sapiens
gccgggggccctggtagcagggcacgggcagcaggggcccgaggatgcaggcttcggtcccagctcgtccctgtcagggccttaggattgggccaccgctcagatgagctggtacggttcaggttctgtagtgggagctgtagaagggcgaggagcccccatgatctttctcttgcctcactcctgggggctggtgccctgagaccacctccgggctccagacctgtttctcagccttgttgtaggccaactaggtacgaggcagtctccttcatggacgtgaactcaacctggaggacagtggacagactgtctgccaccgcttgtgggtgcttaggg

SEQ ID NO: 4505 - DNA, 1107 bp, Homo Sapiens
gagtctagtgaacgtgtatcttattactttagctatcagcatgtaacgaaggttgatgaagtggtggcccaatctctggtgttccctgcagtgactctgtgtaacctcaacgggttccgcttctcaaggcttaccactaatgacctgtatcatgccggagagctcttggctctgctcgatgttaatctgcagatccccgatccacatctggcagacccttccgtccttgaggcactccgacaaaaggccaactttaaacattacaaaccaaagcagttctcaatgttggagttccttcaccgtgtaggccatgacctgaaggatatgatgctctactgcaaatttaagggacaggagtgcggacaccaggacttcacaaccgtctttacgaagtacggtaagtgctacatgttcaacagcggagaggatggaaaaccactgcttacaacagtgaagggcggtaccggaaatgggctcgaaattatgctggacatccagcaggacgaatacctgcccatctggggggagactgaagagacaactttcgaagcgggcgtcaaggtgcagatccatagccagtctgaaccgccttttattcaggaattaggttttggagtagccccagggttccaaaccttcgtcgccacccaggagcagcggctgacatatctccctccaccttggggtgagtgcaggtcctcagagatgggcctggattttttccctgtgtactctatcactgcgtgtcgtatcgactgcgagacacgttacatcgtggagaactgtaactgccggatggtccacatgccaggcgatgccccattttgtacccctgaacaacacaaagaatgtgcagagccagccctggggctcctcgcagaaaaagattcaaattattgcctgtgccgtactccttgcaatctcactaggtataacaaagaattatctatggtcaaaataccaagcaagaccagcgccaaatacctggagaaaaagttcaataagagcgagaagtatatttccgagaacatattagtgctggatatctttttcgaagctctgaattatgagacgatcgagcaaaagaaggcttacgaggtcgctgcc

SEQ ID NO: 4506 - DNA, 276 bp, Homo Sapiens
aggctcatgaaggaagagagccccgtcgtcagctggcgactggagcccgaggatgggaccgcccttgacgtgcatttcgtaagtactctggagcctctgagtaacgcagtgaagcgtaacgtcccaaggtgcatcatcattctcgtgctgcaggaacccaccgcttttcgcatctccgtaacttcatcttgcttcgttcagaataccctgacaaagttgctgaaggatcgaagaaagatgcagactgtacagtgcgccactgctcgtgaaactagc

SEQ ID NO: 4507 - DNA, 276 bp, Homo Sapiens
cggctgatgaaggaagagtctcccgtcgtgtcatggcggctggaaccggaagacggaacagctctggacgttcattttgtgagcactctcgagccgctctctaacgccgttaagaggaacgtccctcgatgcattatcatcctcgtcctgcaggagcccaccccattccgtatttcagtaaccagttcttgtttcgtgcaaaacacactcaccaagctgttaaaggaccggaggaagatgcaaacagtacagtgcgcaacagctcaggagaccagc

SEQ ID NO: 4508 - DNA, 357 bp, Homo Sapiens
catagtgacccggcgcgtcggggagaactgagcgtgtgcgacagcatcagtgaatgggtcaccgctgccgataaaaagaccgcagtagatatgagcgggggaactgtgaccgttttggaaaaggtgcctgtgagtaagggccagctgaaacagtacttttatgagacaaagtgcaaccctatgggatataccaaggaggggtgtcgtggaattgataagcggcattggaactcccagtgtcggacgacccagagctacgtccgcgcgctcacaatggacagtaagaagcgaatcgggtggagatttattcgaatcgatacgtcttgtgtctgtacactgaccatcaaacggggccgg

SEQ ID NO: 4509 - DNA, 417 bp, Homo Sapiens
tccgcctcaagtcggagacggcaacaaagccgaaaccgcagcacgcagagccaggatgtcgcccgcgtctccagtgcttcagactataactctagcgaacttaagacagcgtgtcggaagcatgaactctacgtatcattccaggacctcgggtggcaagattggataatagcgcctaagggatatgctgccaactactgcgacggagagtgcagtttccctctgaacgcccacatgaacgcaactaaccatgccatcgtgcagacactggtgcatctcatgaacccagaatacgtgccaaagccctgttgtgctcctactaaactgaacgccatttccgtactgtactttgacgacaattccaatgtcattttaaagaaatatcggaatatggtggtgagagcatgcgggtgccac

SEQ ID NO: 4510 - DNA, 699 bp, Homo Sapiens
cataaacagccatggcctgggctggcacaagcacatagggataacaaatccactctggcccgcataatcgctcaggggctgatcaagcacaatgcagagtcccggatacagaacattcatttcggcgataggctgaacgcttccgctcaggtggcgcctggcctggtaggatggctgatcagcggaaggaagcatcagcagcagcaggagagttctataaatatcacaaatattcagctggactgtggcggcatccagatttcctttcacaaagagtggtttagtgcgaacatttctctcgaatttgacctggagttgcgaccatctttcgacaataacatcgtaaaaatgtgtgctcacatgagcatcgtcgtggaattttggctggagaaggacgagtttggaaggcgtgatttagtcatcggcaagtgcgatgctgagccaagctctgtgcatgtcgcgatccttacagaggccattccgcccaaaatgaatcagtttctctacaacctcaaggaaaacctgcagaaggtgctcccccacatggtggaaagccaggtgtgtccccttatcggcgagatcctgggccagctggacgtgaaattgttgaagagccttatcgaacaagaagcggctcatgaacccacacatcatgagacaagccagccgagcgcttgccaggctggtgaatccccttcc

SEQ ID NO: 4511 - DNA, 477 bp, Homo Sapiens
caggaggtgcttgctggtgtgtcatctcagttgctgaacgacctgacccagggcctcttaagggcagactttttgccttcccttcagaccactggcctgcaaaaaccactttctagcgccttcgacggcgtgtccggactgctggatatctttggcccaccgctcaccaatgaaattaataccgtaagcattcaggtaaagaaccctcagttacttcacgtatccattgagagtaccccacagcgcaaggaggccacagtacaagtgccgtttactagcgagcttatcgttcagcttcttaccatgaagccatttacggctaacatgcagagtgatatcaaagtgcagatccgtctggagaaaaacgtggggggccgctatgagctggcattcggtaactgcaggctccttcccgaagctatttggattcagactggggttcaactggcaccagcacagaatctcctttggcagact

SEQ ID NO: 4512 - DNA, 1452 bp, Homo Sapiens
caaacgatctacccaggcattaaagctagaattacacagcgggccttagattatggtgtacaggccgggatgaagatgattgagcagatgctgaaggaaaagaagctgccagacctcagtgggagtgagtcactcgagttcctcaaggttgattacgtcaactataatttcagcaatataaaaatttccgctttttctttccccaatacctctttagcctttgtgcctggcgttggcatcaaagcgctcaccaaccatggcactgctaatatctcaacagattggggtttcgagtcaccactcttccaggacacgggaggagcggacttattcctgtctggtgtctacttcaccggcatcattatcctgaccaggaatgatttcggccatccaaccctgaagctgcaagattgctacgcccaactgtcacacgctcacgtgtctttttctggggagctctcagttctctataattctttcgctgagcccatggagaagcccatcttaaaaaatctgaatgagatgctttgtcctattattgcatctgaagtgaaggcgctgaacgccaatctgtccacgcttgaggtccttaccaaaattgacaattacaccctgctcgattatagtctgatttcctcacccgagataacagaaaactacctggatctgaatcttaaaggggtcttctatcctctggagaacctgacggaccctccgttttcccctgtccctttcgtgctgccggagagaagtaactcaatgctgtatattggtatagctgaatatttttttaagtctgccagtttcgcccacttcactgccggggtcttcaatgttacgcttagcaccgaggagattagcaatcatttcgtacaaaacagtcaggggctcggaaatgtactgtcaagaatagcggagatatatattctttctcagccattcatggtgcgcattatggctaccgagccacccattattaacctccaacccgggaacttcacacttgatatccccgcaagtatcatgatgttaacgcagcccaagaactcaaccgtcgaaacaatcgtctcaatggacttcgtggcttctacaagcgtagggctggtcatcttgggccagcgtctcgtgtgcagcctttctctgaataggttccgattggccttgccagagtcaaatcgtagcaacatagaggtcctccggtttgaaaatatattgtcctccatccttcactttggtgtgctccccctcgcgaatgcaaaactccagcaggggtttccactgtcaaatcctcacaagtttctttttgttaacagtgacatcgaggtgctggagggatttcttttgattagtaccgatcttaaatatgaaacaagttcaaaacagcaaccctcctttcacgtttgggagggactgaaccttatttcccggcaatggcgcggtaaatccgcaccc

SEQ ID NO: 4513 - DNA, 1350 bp, Homo Sapiens
gcccagagggcagatgtggggggcgaagccgccggcacaagcattaatcatagccaggcagtcctgcagagactgcaggaattactgagacagggcaacgcctcagatgtggttttgcgtgtgcaggccgcaggaaccgacgaggtgcgcgtcttccatgcccatcgcttacttctcggcctgcattccgaactgtttctcgagctgctttccaaccagtctgaggctgtgttgcaggagcctcaagactgcgctgccgtgttcgataagttcataagatacctgtattgcggtgagctgaccgtgctgctgacccaggcaatcccgttgcacaggttagctacgaaatacggagtcagcagcctccagcgcggcgtggccgattatatgcgcgcccatcttgcgggcggggccgggcccgcagtgggctggtaccactacgctgtgggaacaggggatgaggccctccgtgaatcctgtctgcagttcctcgcttggaatctgagtgccgtcgccgcttctactgagtggggcgcagtctcacccgagcttctctggcagctcctgcagcgcagcgatttggtcttgcaagacgagttagaattattccacgcgcttgaggcctggctgggacgtgctaggcctccaccagcagttgccgagagagccctgcgggccataaggtacccaatgatccccccagcccaattattccaactgcaggccaggagcgcggccctggcccgacacggtccagccgtcgctgacttgctcctccaggcctaccaattccacgctgcttcaccattgcactacgcgaagttcttcgatgtgaatggaagtgccttccttccacggaattacctggcccccgcgtggggcgccccgtgggtgattaacaaccccgcaagagatgacagatccacttccttccagactcagctgggcccaagcgggcatgacgctggaaggagagtcacatggaacgtcctgttctcaccacgctggctccctgtttcccttcgccccgtatatgctgatgcagccgggactgctcttcctgccgccagaccagaggacggtcgaccacggttggttgtcaccccggcctcttccgggggggacgcagctggggttagttttcagaaaacggtccttgtaggcgcaagacagcagggacgcctgctggtgcgccacgcctacagtttccatcagtcaagcgaggaagctggtgattttctggcacacgctgacctccagagacgaaattcagagtacctcgtggagaacgccctgcacctgcacctcatagtgaaaccagtgtaccatactttgattcgcacacctaaa

SEQ ID NO: 4514 - DNA, 315 bp, Homo Sapiens
ggagttactggcgcttggcctaccagcggtcttagcatcctggctcagctgcaacccagttgcgagctgaggtggacccaactttcccggagcagctggcgcgacctggtgatgacaacgagcctgtggtcattagcatactttcagcatttttctcaagagaccaccacccaagagcagcttgacgaaatggaagaaatccctcgcgaatcacagtgcggtaggcaggattttcatgcactgagctgtcctacagccagcccccgggacagggtgctgttgtgctgcccgggctggagagctatggtgccttct

SEQ ID NO: 4515 - DNA, 204 bp, Homo Sapiens
cagccgctccggtcacaacggagcgttcctgaagctttcagcgcccccttagaactgtctcagcctctgagcgggctcgtggatgactacggcattctgcctaaacatccgcggccgcggggaccgcggccactgctcagccgagcccaacaaaggaagcgtgacggaccggacctggctgagtattattacgatgcccatttg

SEQ ID NO: 4516 - DNA, 1563 bp, Homo Sapiens
cgatgttgctgttgcgcatgcaaatcagagacaaatgggggcaataccggaagccagggaggaaatcctcctcccagcacccctattacagtgacaggtcacgggctggcggttcagtccagtgaacagctgttgcatgtgatataccagcgggtcgacaaagccgttgggctggccgaggctgcgcttggcctggccagggccaacaatgagctgttaaagcggttgcaggaagaggttggcgacttgaggcagggaaaggttagcattcccgatgaggatggcgagtctagagcccactcctctcctcccgaagaaccgggccctttgaaggagagccccggggaagcatttaaagcactctccgcggttgaagaagagtgcgatagcgtcggtagcggagtgcaggttgttattgaggaactccggcaacttggggcggcctccgttggtcctggccctctgggattcccagcaacccagagggacatgcggttaccggggtgtaccctggccgcctctgaagctgctccactgctgaatcctttggtggatgactacgtggcctctgaaggcgctgtgcagcgtgtgctcgttcccgcttacgcgaaacagttaagtccagcaactcagctggctatccaacgcgcaactccagagacaggacccgagaatgggactaaactccccccacctaggcccgaggacatgttgaatgccgccgccgcccttgactccgctcttgaggagtctggcccaggtagcacaggggaacttcggcacagtctgggcctgaccgtctccccgtgtcgtactcggggcagtggacaaaaaaacagccgtcggaaacgcgacctggtgctctctaagctggtccacaatgtccataatcacattactaacgataaaaggtttaatgggtcagagtcaatcaagtccagctggaacattagcgtcgtgaaatttttgcttgaaaaactgaaacaggaactggtcacatccccgcataactacactgataaggaactgaagggcgcgtgcgtcgcttattttttaaccaagcgccgtgagtatagaaacagtttgaatcctttcaagggtctcaaagagaaggaagagaagaaattgcgcagccgcagatatagactcttcgccaaccggtcatctattatgcgtcattttggtcccgaagatcaaaggctttggaacgacgtgactgaggagctgatgtccgacgaggaggattccctgaacgaacctggtgtgtgggtcgctcgcccccccagatttagagctcagcgtctgaccgagttgtgttaccacttggacgccaactctaaacacggcacaaaggctaacagagtctatgggcctccctccgacaggttgcctagcgctgaagcacaattactcccccccgagttatataacccgaacttccaggaggaagaggatgagggcggcgacgaaaatgcaccgggctcccctagctttgaccagccgcataagacttgttgccctgatctgaatagctttatcgagatcaaggttgaaaaggatgaa

SEQ ID NO: 4517 - DNA, 393 bp, Homo Sapiens
agacccaaaccaagcgcttctgaagtcctcactcgccacctcctccagcggcggttgcctcattggacctctttttgcgttccttactccgccgtgcgtaacgatcaattcggcttgtcccattttaattggccagtacagggagcaaattatcacgtgttacggaccgggtgttttcctttcataaagtaccactgcagcaaggcaccctggcaggatcttgctaggcagaatcggttctttaccgccctgaaggttgttaacctgggcataccaaccctcctttacggccttggatcatggctgtttgctagagtgacggagaccgtccatacttcttacggccccatcaccgtgtattttctcaataaggaggacgagggagcaatgtac

SEQ ID NO: 4518 - DNA, 387 bp, Homo Sapiens
aaatctatggagaacacagttacaaggaattctaccgccgtcataaatacccaggccgagggaaccctttcaccccccgggttaagttcactgccagtagtgagggagtgggctctgacacacaccgcacagctcccggaatgctgtgtggatgttgtgggggtgaatgcctcttgccccggcgcatctctgtgcggtcccggttgctatcgccgatggaacgcagacggctccgcctcctgcgtccgctgcgggaatggcacattgccagcctacaacggctcagaatgccggagttttgctgggcctggtgctcctttcccaatgaatcgttcaagcggtaccccaggcagaccacatcctggggccccccgcgtggctgcttcc

SEQ ID NO: 4519 - DNA, 669 bp, Homo Sapiens
gaagacctgtgccgcgctcctgatgggaagaagggggaggcgggaagacccggtaggcggggccgaccagggctgaagggggagcagggtgaacctggcgcacctggaattcgtacgggcattcagggactgaagggagaccagggtgaaccgggcccgagtggaaatccaggaaaagttggataccctggccccagcggtccactgggcgccaggggaattccggggattaaaggcacaaagggctcacccggtaacatcaaggatcaaccacgacctgccttctccgccatccgcagaaatcctccgatgggcggcaatgtggtgatttttgatacagttataacaaatcaggaggagccataccaaaaccattcaggccggttcgtgtgcaccgtccctggttactattactttacattccaggtgctcagccagtgggagatatgtctcagcatcgtttccagctccagagggcaggtccggcgaagtctggggttttgcgacaccacaaacaaagggttgtttcaggtcgtttctggcggcatggtgcttcaactgcaacagggggaccaggtgtgggtggagaaagatccaaagaagggacatatttaccagggctcagaggctgacagtgtattcagtggttttctgatatttccctcagcc

SEQ ID NO: 4520 - DNA, 678 bp, Homo Sapiens
cagctgagctgtaccggcccccccgctattccagggatacccggcattccaggcacgccaggacccgacgggcaaccagggacacccggcatcaagggcgagaaaggtctgccaggtctggcgggcgatcacggtgaatttggcgagaaaggcgaccccggcatacccggaaaccccggcaaagtgggtcctaagggtccgatgggtcccaaggggggccctggggctcccggtgccccagggccaaaaggcgaaagcggggattacaaggctacccagaagatagcattctctgccacgcggacaatcaatgtgcccttgaggagagatcagacaatccgcttcgatcacgtgattaccaatatgaacaacaattacgagccaaggtccggaaaatttacctgcaaggttcctggtctctattattttacttaccatgcttcttctagaggtaacctgtgcgtaaatctcatgcgcggtagagaacgcgcgcaaaaagttgtcactttctgtgactacgcctataacaccttccaggtgacaactggggggatggtgctgaagttggaacagggggagaatgtctttctgcaggctacagacaagaattcattactgggaatggaaggggccaactctatcttcagtggctttctgctgtttcctgatatggaagcg

SEQ ID NO: 4521 - DNA, 651 bp, Homo Sapiens
aatacagggtgctacggaatccccggaatgcctggtctgccaggtgcgcctggtaaagatggctatgacgggctgccaggacctaagggcgaacccggaatcccggctatccctggtattcgaggccccaagggccagaaaggagagcctgggcttcctgggcacccaggaaaaaacggtcccatggggcctccaggcatgcccggtgtacccgggccaatgggcattcccggcgaaccgggagaggagggcagatacaagcagaagttccagtctgtctttactgtcactcggcaaacccatcaacccccggctcctaactctctgatcaggttcaatgcagtgttgactaatccacagggagactacgacacctcaaccggcaagtttacttgcaaggtgccgggactgtactatttcgtctatcatgcctctcataccgctaatctttgcgtgctgttatacagatctggagtgaaagtggtgactttctgtggacacacctctaagacaaatcaggtcaatagcggaggcgtgcttctccgactgcaggtgggggaggaggtctggctcgccgtgaacgattattacgatatggtcggaatccaaggatctgattcagtcttctctggtttcctcctgtttcccgat

SEQ ID NO: 4522 - DNA, 705 bp, Homo Sapiens
cactatgagatgctgggtacatgtaggatggtgtgtgacccatacggcggcaccaaggccccttccacggccgcgacacccgacaggggtctcatgcaatcactgcctacgttcatacagggacctaaaggtgaggctgggcgccctggtaaggcaggtcctcggggccctccaggcgaaccaggaccccctggcccgatgggcccacctggggagaagggcgaaccagggcggcagggtctgcctgggcctcccggagcccctggcttgaacgctgcaggcgccattagcgccgccacgtatagcacagtgccaaagattgcattctatgccgggttgaagcggcaacacgagggctatgaagttctgaaattcgacgacgtcgtcaccaaccttggcaaccattacgatccaactaccgggaagttcacttgtagcattcccgggatttatttctttacctaccacgttctgatgagaggaggagatggaaccagcatgtgggccgacctgtgtaagaacaaccaggtgagggccagtgccatcgcccaggatgccgaccagaactatgactacgcttctaactccgttgtgctgcatcttgaacctggcgacgaggtttatattaagctggatggtggcaaggcccacggagggaacaataataagtacagcactttttcagggttcattatctacgcggat

SEQ ID NO: 4523 - DNA, 846 bp, Homo Sapiens
gggggcgtcggcgcgcggagagaagctcaaaggacccagcagcccgggcagcgagccgatccgcccaatgccacagcgtccgcatcctcacgcgagggactgccagaagcccccaagccctctcaggcctcaggccctgagttctcagatgctcacatgacctggttgaatttcgtgaggaggccagacgatggggcgttgcgcaaacgctgcggtagcagggataaaaagccaagggatttattcggcccacccggcccaccaggcgctgaagtcacagccgaaaccttgcttcatgagtttcaggaattgctgaaagaggcaacagaacgccggttctcaggactcctggacccattgctgcctcagggcgctggcctgcggctggtgggggaggccttccactgtaggctccagggcccacgaagagtcgataaacgcacgctggtggagctccatggatttcaagctcctgccgcccagggtgctttccttagaggtagcgggctgagccttgccagcggtcggtttaccgcaccagtgtccggaatttttcagttctcagcttcacttcacgtggatcacagcgaactgcaaggcaaggctaggctgcgcgctcgcgacgtggtgtgcgtcctgatctgtattgagtccttatgccaacggcatacctgccttgaggcagttagtgggctggagtccaacagccgcgtgtttacacttcaggtccaggggctgctgcaattgcaggccgggcagtacgccagtgtgttcgtcgataatggatctggagcggttctgacaattcaggcaggctcttcattctcaggattattgttgggtacg

SEQ ID NO: 4524 - DNA, 600 bp, Homo Sapiens
ctgaattgcttcaccaaggggcaaaagaacagcacactcatctttacgagggagaatacgatccgcaattgtagttgtagcgcagacattagggactgtgattactccttggcaaaccttatgtgcaattgtaagactgtgctccctctggccgtcgagaggacaagttacaatggtcatctcaccatctggttcactgacactagcgccctgggccacttattaaattttaccttggtacaggacctgaagctgagtttgtgttccaccaatactctgccaacggaataccttgcaatctgtggactgaaaagattgagaataaacatggaggctaaacacccatttccagaacagagcctgctcatccactccggaggcgactctgacagcagagagaagcctatgtggctccacaagggatggcagccctgcatgtacatttcttttctggatatggctctgttcaatagagacagcgcgttcaaaagctactccattgaaaacgtcacatctatagccaacaacttcccagatttctcctactttaggactttccccatgccctccaacaagtcctacgtcgtcacctttatatat

SEQ ID NO: 4525 - DNA, 678 bp, Homo Sapiens
cccgaatgggaacccgtgcaaggcctgttatcacagaaccacagctgtcgagacccacagtgctgcggcaacctgttggtgctctgcttgttcctggtgtggcaagtgcggcactgttggcaccaggtgactaggacaaggttttccacaagaaacgtcatcaaagttcccctgcagaaacgcgctgtccccagcatgaggtgcgagaccgtattcaaattgactccggagtttttcagtccaggaaagagcaggggcttggactcccaacagtgcgcacagcgccagcgctggggttataggcgttccctgcaagagtcttgggctcagaatttgctgtctccccagcatccatgtccgggtcccccttcaggggttcatactcactccgaaccaatattttgcactaccagtatcagtaacacctgccttctgccccaaaacagcagctggaaagcctggcaggtgccatggtgccttcatgatgggcagactcggcctgcactggatatgtgccaagaaatggagcagctgctgctgcactcacaggagcgtctcgtgagtttagagcctgttatctcagtccgctctcggccgaccagcatgacactgactactagtttgcccaatttactgtccgccgagcgattgcagttctgtcctcagagggcacccgca

SEQ ID NO: 4526 - DNA, 1083 bp, Homo Sapiens
agtagctgtagccaggctagaaccatgaaccccggtgggagcggaggcgccaggtgctccctgagcgctgaggtgaggaggcgccagtgtctccaattgagcaccgtcccaggggcggacccccaaaggagcaatgagctgctgctgctcgccgccgccggagaggggctggagaggcaggatcttcccggagacccagccaaggaagagccacagcctcccccacagcatcatgtattatactttcctggagatgttcagaattatcatgaaatcatgacgaggcatccggaaaactaccagtgggagaactggtctctggaaaatgtggctactatcctggcccacagatttccaaattcttacatctgggtgatcaagtgcagtaggatgcatctccacaaattctcctgttacgataattttgtgaaatcaaacatgttcggagccccggagcataataccgacttcggggcgttcaagcatctgtacatgcttttggtgaacgcatttaatctgtctcagaactccctttcaaagaagtctttaaatgtgtggaataaggattctattgcatcaaactgtaggagcagtccatcccacactaccaatggctgtcaaggagagaaggtacggacatgtgagaaatctgacgaatccgccatgagtttctaccccccttctctgaacgatgcgagtttcacacttatcggcttctctaagggatgcgtggttcttaatcaattactgtttgaattgaaggaggccaaaaaggataaaaacattgatgcctttattaaatccatccgaactatgtactggcttgatggtggacatagcggcggttccaatacatgggtgacctaccctgaagtgctgaaagaattcgcacaaacaggtatcatagtgcacacacacgtcacaccctaccaggtgcgtgatcctatgcgcagctggatcggtaaggaacataaaaagtttgttcagattctgggagacctgggcatgcaagtgacttcccagatccacttcaccaaggaggccccttctattgaaaaccatttccgcgttcacgaggtcttt

SEQ ID NO: 4527 - DNA, 408 bp, Homo Sapiens
gacgaggaggaagtccccgaggagtgggtgctgttgcacgttgtgcaaggccaaatcggggccggcaactatagctatcttaggctcaatcacgaaggcaagattgtgttgagaatgaggagtctcaagggagacgcagacctgtacgtgtccgcttcttctttgcaccccagcttcgatgattacgagctgcagagcgcgacatgcggaccagatgctgtgagcatccctgcgcattttcggcggccagtgggaataggcgtctacgggcacccgagccatttggagagcgagttcgaaatgaaagtttactatgacggcaccgtggaacaacatcctttcggcgaagctgcctatccagctgacggggccgatgccggccagaagcacgcgggggcccccgaggac

SEQ ID NO: 4528 - DNA, 369 bp, Homo Sapiens
atggattcactcgataggtcctgccaagactggtgtgataggaaacagcactggctcgaaatcgggccacctgacctggtcgagcggaaggggagcctcacgttgaggtcccaccacaaaaaatacagcaagcctgtccttgtttattcctggcatcgggaccgggaggcctttcctaaggggtacgacatcgagggaccggaaaaggtaaaaaagctgtgtaactccacttaccggaggctcggtactgacgagagtcctatatggacatctgagacgcatgaaaaactctctcaaatgtgcctgaatacagaatgggtggaaatgaagtctaaggccctcctgaacgaagaaaccgtgtcctcaggc

SEQ ID NO: 4529 - DNA, 546 bp, Homo Sapiens
aacaaaccgagcctgagtggcagacaggccccagcgcaagctcagacctctgaccttgtcccatccttatttccacttggactgtgggcccccggcttttgcacgtggtcaagccctgacgaggataaggtctggcgtcccgcttgggagcaaggaccaaaaggagagcccgaccctcgaggactgcgcccccgaaagccagtgcccggcaccggaaatcgggattctggcactaggagacggctccaggacgcaaccgaacaagatcctcggccaggcaacgatgtagcatctgcagagaccgccggtcccccctcaccctcaggtattagggctcaggatagagcacctcgccatcgaagagcccctcctgcacgaatgccagtcgcacccgcaccaagtgctgacggagagcctctccaagagcaagggggtggtttgttccacagaaccaggagtgtgtataacggacttgagttaaatacatggatgaaggtagagcgtctgtttgtggagaaattccatcagagcttcagcctggataac

SEQ ID NO: 4530 - DNA, 873 bp, Homo Sapiens
cagcacgtttccgattggacatacagtgaaggtgcactggacgaggctcactggccacagcactatcccgcgtgcggtgggcagcgacagtctccgattaacctgcaacgtaccaaggtgaggtataacccaagcctcaagggactcaacatgacagggtatgagacacaggccggtgagttcccaatggtcaacaacgggcataccgtgcaaattagcctgccttctacaatgcgcatgacagtcgccgatgggaccgtctatatagcacaacagatgcactttcactggggaggggctagttccgaaatttctggctccgaacacacggttgacggcattaggcatgtaattgaaattcatatagtgcactacaactcaaaatacaagagttacgacatagcacaagacgcgcctgatgggctggccgtccttgcggctttcgttgaggtgaagaattacccagagaatacatattactccaatttcatttctcacctggccaatattaagtatccaggccaacgcactaccttgacaggcctggatgtccaggatatgttgccacgcaatctccaacattactatacatatcacgggtccctcaccacgccaccctgtactgagaatgtgcattggtttgtcctcgccgactttgttaagctctcccgtacccaagtttggaagctcgagaactcattactcgaccatagaaataagacgattcataatgattacaggcggacccagccactcaatcatcgcgtggttgagtcaaattttcccaatcaagagtacaccctgggctcagaatttcaattctatttacacaaaatcgaggaaatcctcgattatcttcggcgggctctcaat

SEQ ID NO: 4531 - DNA, 261 bp, Homo Sapiens
atggttaaacttggttgttccttctccggcaagccaggcaaggaccctggcgatcaggacggcgcagccatggactcagtccccctgatcagccccctggatatttctcagttgcagcctccattgcccgaccaggtggtgatcaagacacagaccgaataccaactttcttccccagatcagcagaatttccctgatcttgagggtcagagacttaactgttcccaccccgaggaaggtcgacggctgccaacagcgaga

SEQ ID NO: 4532 - DNA, 519 bp, Homo Sapiens
cagaatgacaccgagccgattgtactggagggcaaatgtctggtcgtttgtgatagttccccgagtgccgacggcgccgtcacctcttccctcggtatctctgtcaggagcggctccgccaaagtggcctttagtgcaaccagatctacaaaccacgagcctagtgaaatgtctaatcgtaccatgaccatttacttcgaccaggtgctggtgaacattggtaatcacttcgatctggcctctagcatcttcgttgcccctagaaagggaatctattctttctccttccatgtggttaaggtatacaatcgtcaaaccatccaagtgagcctgatgcagaacggctacccagtgataagtgcttttgcgggggaccaggatgtaaccagagaagcagcctctaacggcgtcctcctgctcatggaaagagaagataaagtccacctcaaactggaaagaggaaacctgatgggggggtggaaatactctaccttttccggatttcttgtgttcccactg

SEQ ID NO: 4533 - DNA, 519 bp, Homo Sapiens
caggagggaagtgaacctgtcctgcttgagggggagtgtttggtggtgtgcgagcccggacgggctgccgccgggggacctgggggcgccgctctgggagaggctcctccgggccgggtagcatttgctgccgtgcgtagccatcaccacgagcctgctggcgaaactggaaacgggacaagcggcgctatttattttgaccaggtcctcgtgaacgagggaggtggattcgacagagcttctgggagctttgtggctcctgtgaggggcgtgtactcattcaggttccacgtggtcaaagtctacaatcggcagaccgtgcaggtttctctcatgctgaacacctggccagttatcagcgcatttgctaatgatcccgacgtcaccagggaggccgctacttccagcgtgctgctgcctttggacccgggggatagggtgagcttaaggctgcgcaggggaaacctgctggggggctggaagtattcatcattcagtggcttcttgattttcccactc

SEQ ID NO: 4534 - DNA, 579 bp, Homo Sapiens
gcccaacctgaagatcgtcgagtgttacggtatccaggaactgccgtcatggttacatgcccaaatcgaccactcgtgcctcgtcctctgcttactcccggtggttcccgggctagcttggctctctgtgcatttgtcgctgtccctcagaggataccgcagcctctgttgccggcctacattttacttatgctgccgagtctggtagtggatatggcactgccaagcagtcggttacttcgatctattaaacccatccagcccgccagccaagtagtgcgcaaggagcgtaatcctaaccccaattgcccacagtccgaccctctcatgaaagccagcagcacttcttttctgagtcatacttacctcattaataagacacgcagcactacgagaaaagtcgaagagcattcctggttcacatgcacgggtgccaaatatttcgccatacctctggccgagcgtaacactaaacggctcactaagagaagcacacacgcccaactcctccggggtaagcaagacgggagcgaatgggtagtgccacggagtagcgcaagcagcaatgtgctgtatcat

SEQ ID NO: 4535 - DNA, 483 bp, Homo Sapiens
gtgaatggatgttgcggactgcaaatgatcgcactttgggcccagtcatccggaaatgcggatgcaagggtagaggagatcttagctggcgaggaacgcaggcttgctgctctgttaggcagtcagggcatgcggttttgggtatgtcttgccgcatgcagagcaatgtggggacttgccgctagacggggccgagcagaggattcctcaagttcacccgtggacgctagtaaattcccgtggaggggagggcagcacagaactactatgatgccctgcctgcttcgggttggcgtgtttagaccttgtcacgtacggcccaccggagacccatcctgcgacgttcagccccctagactggggtttagcagagtacccgatacccaagttgctttttatggctctggccattgggacccgacgccgtttagcgtgcattcttgcttctttaacttccaggtacgaaaaatcattttcttgctg

SEQ ID NO: 4536 - DNA, 807 bp, Homo Sapiens
ggacatctgtccagtcctccactggtggatacactgcatggaaaggttctggggaaattcgtaagccttgaaggcttcgcccagcctgtcgctgttttccttggaatcccattcgccaagccgcctctcggtccattgaggtttaccctgcctcagcctgccgaaccttggaattttgtgaaaaatgccacgtcctacccccccatgtttacccaggatccaaaggctggacaattgatctctgagttattcacaaaccgcaaggaaaatattcccctgaagctcagcgaagactgcctctacttgaacatttatacccctgcagatcttaccaagaagaaccggcttcctgtgatggtatggatccacggcggaggcctcatggttggtgctgcttccacttatgatggtcttgcactggccgctcatgagaatgttgtggtagtgaccatacagtaccgcttagggatttggggctttttctcaaccggggacgagcacagtccaggaaactggggacatctcgaccaactggccgcactgcattgggtccaagataacatcgccagtttcggcggaaacccgggatctgttactatattcggtggcagcgtcggcggagaatcagtttccgtgctggtgctgagccctctggctaaaaacctgttccaccgtgcaatctctgaaagcggtgttgccttgacaagcgtgctggttaagaagggagacgtcaaaccgctggccgaggtgggactgaggcttgtgcgattacgcctcgacacccccacctccctggccctgtgtagc

SEQ ID NO: 4537 - DNA, 1623 bp, Homo Sapiens
gcacttcataccaagaggcctcaggtagtaaccaaatatggcacactccagggaaaacaaatgcatgtggggaagacccctatccaggttttccttggcgttcccttcagcaggccacctctcgggatactgagatttgccccccctgaaccacctgagccttggaaaggcatcagggacgccactacatacccacctggttgcctgcaggaatcatggggccagctggcgagcatgtacgtgagcacccgggagcgctataagtggctgcgattcagcgaagattgcctctacctcaacgtgtatgctcctgcccgcgcaccaggcgacccgcagctgcctgttatggtctggtttcctggcggagcattcattgtaggcgccgccagctcttacgaaggctccgacctcgccgctcgagagaaagtcgtccttgtgttcctgcagcaccgcttgggaatctttggctttctgtccacagacgattcccacgcccgcggcaactggggcctgctcgatcagatggctgctctcagatgggttcaagagaacatcgcagcctttggaggtgacccaggcaatgtcaccctcttcggccagagcgccggcgcaatgtccatttctggactgatgatgtcacctctggcgtccggtttattccatcgcgctatatctcagagtggcaccgcactgttcagactgttcatcacatccaaccctcttaaagtggccaaaaaggtagcccatcttgctggctgtaaccacaactcaacccagattttggtgaattgtctcagggcgttgagtggcacaaaggtgatgcgcgtgagcaacaaaatgcgatttcttcagttgaacttccagcgcgaccccgaggagataatctggtctatgtcacctgtggttgacggcgtcgtcattcctgacgaccccctggtgctcttaacacaaggcaaggtgtcctctgtcccttacttgctgggagtcaacaatcttgagttcaattggctcctgccatacattatgaaattcccactgaaccggcaggcaatgcggaaggaaacaattaccaagatgctgtggtcaactcggacattgttgaatattacaaaggagcaggttcccttagttgtggaagagtatctggataatgtcaacgaacatgactggaaaatgctccgtaataggatgatggatattgtgcaggatgccacctttgtgtatgccactctgcagactgctcactaccaccgtgatgcgggcttaccagtgtatttatatgagtttgagcaccacgcgagagggataatcgtgaagcccaggaccgatggggccgaccatggcgacgagatgtacttcctgttcggcggcccttttgctaccgggctgtccatgggcaaggagaaagctctgagccttcagatgatgaaatactgggccaacttcgcacgaacaggtaaccctaacgacggaaatctgccatgttggccaaggtacaataaggatgaaaagtacttgcaactggactttactacccgggtcggcatgaagctgaaggagaagaagatggcattctggatgagcctttaccagagtcagcgacctgagaagcaaaggcagttc

SEQ ID NO: 4538 - DNA, 1665 bp, Homo Sapiens
gcacctactaaaggcccttccgccgagggcccccaaaggaatacgcggcttggctggattcaggggaagcaggtcaccgtccttggatccccagtccccgttaatgtcttcctgggcgttccgtttgcagccccacccctgggcagcttgaggttcacaaacccccagcccgcgtcaccctgggataacctccgtgaagccacttcttacccaaatctgtgtcttcagaattcagaatggcttctcttggatcaacacatgctgaaggtacattaccctaaattcggcgtgagcgaggattgcctttacctgaatatctatgcgccagcacacgcagacacagggagcaaattgcctgtgctggtgtggttcccgggaggcgccttcaagaccggaagcgcatctatatttgatggtagcgccctcgcggcatatgaagatgtgctcgtggttgtggtccagtaccgacttggtattttcggcttctttaccacgtgggaccagcacgctcccggtaattgggccttcaaggatcaggtcgcagcactgtcttgggttcagaagaatatcgaattctttggcggggacccatcaagcgttactatattcggcgagagcgcaggcgcaataagcgtatcaagtctcattcttagcccaatggctaaagggctgtttcacaaagcaatcatggagagcggggtagctatcatcccctatttagaggcccacgactatgagaagagcgaggatctgcaggtggtggcccacttctgcgggaacaacgcatcagactcagaggccctgttacgatgcctgcggacaaaaccatctaaggagttgctgacactcagtcagaaaaccaagtcattcacaagggttgtagatggggccttcttccccaacgagcctctggaccttctgtctcagaaagcctttaaagccatcccctccattatcggcgtgaacaaccacgaatgtggatttctgctccccatgaaggaggcccccgagatcctgtctggctccaataagtcccttgccctgcacctgatacagaacatccttcatatcccacctcaatacctgcacctcgtggctaacgagtacttccacgataaacacagtctgaccgaaatccgggatagcctccttgacctcctgggggacgtgttctttgtggtcccagctttgatcaccgcccgctatcatagagatgctggggcccctgtgtacttctacgagttcagacatcggccccagtgcttcgaagatacgaaaccagcatttgtgaaagccgatcatgcagacgaagttcggttcgtgtttgggggggcattcctgaagggagacatcgtgatgttcgagggagccacggaagaagagaaactgctcagccgcaaaatgatgaagtactgggccaccttcgcaaggaccggaaacccaaatgggaacgatctgagtctctggcccgcttacaatttgaccgagcagtacctccaacttgatcttaacatgtctctgggacagcggcttaaagaacctagggtggacttctggacttctacaatccccctgatactctctgcctccgacatgttgcacagccccctgtctagtctgaccttcctgagcctcttacaaccctttttctttttctgcgcacca

SEQ ID NO: 4539 - DNA, 276 bp, Homo Sapiens
gcccccgacgtgcaggattgtcctgagtgtactttgcaggaaaacccattttttagccagcccggggcccctatcctgcagtgtatgggctgctgtttttcacgcgcttaccctacccctctgcgctctaagaaaacaatgctggttcaaaagaacgttactagtgagtccacgtgttgtgttgcgaaaagttacaaccgagttaccgtgatgggcgggtttaaagtggagaatcacacagcttgccattgttctacatgttattatcataagagt

SEQ ID NO: 4540 - DNA, 411 bp, Homo Sapiens
tcaaaggaacctctgcgtccaagatgcaggccaattaacgcgactctggccgtggaaaaagaggggtgcccggtctgcattaccgtgaataccaccatatgtgcgggatattgccctacgatgactcgcgtgctgcaaggagtcctgccagctctgccacaggtggtttgcaattatcgggacgtgaggtttgagtccatcagattgccaggctgccccaggggtgtaaaccctgtggtcagctatgccgtggccttgtcctgccaatgtgctttgtgtaggcgctcaactactgattgtggtggaccaaaggatcatcccttgacgtgtgatgatcctaggtttcaggactccagctcttctaaggcaccgcccccaagtctgcctagccctagcagactgcctggacca

SEQ ID NO: 4541 - DNA, 435 bp, Homo Sapiens
agcaaagaacctcttagaccccgttgtcgcccgatcaatgcgaccctggcggttgagaaagaggggtgccccgtatgtatcaccgtgaacaccaccatttgcgcgggctattgcccaaccatgacccgagtgctgcaaggagtgcttccggctctgccccaagtggtgtgtaactaccgagacgtccgcttcgagtctattaggctgcccggctgcccaaggggcgtcaatccagtggtgtcatatgccgtcgctttgtcctgccagtgtgctttgtgtcgtcggtctactaccgactgtgggggccccaaggatcacccgctgacatgtgacgacccacgattccaagcgagctctagctctaaggctcctccacctagtttgccatctccttctcggctgcctggcccctcagatacccctatcctgccccag

SEQ ID NO: 4542 - DNA, 435 bp, Homo Sapiens
tctaaggagcctctgaggcccaggtgccgtcctatcaacgctacacttgctgttgagaaggagggatgtcctgtatgcatcacagtgaatacaacaatctgcgctggctattgcccaaccatgaccagggttctccagggtgtcctcccagctttgcctcaggtggtttgtaattacagagacgtgcgattcgagtctattcggctcccaggctgccccagaggtgtgaatccagtggtaagctacgctgttgccttgtcctgtcagtgtgcactctgcaggagatctacaactgactgcggcggacccaaggatcacccattgacttgtgatgatccccgcttccaggacagcagctcatccaaggctcctccgccctccctgccctcaccttcaaggttacctggaccctctgacacacctatactgccgcaa

SEQ ID NO: 4543 - DNA, 435 bp, Homo Sapiens
tctcgagagatgctcaggccaagatgtcggccaatcaatgcgactttggccgttgaaaaggaggggtgccctgtgtgcatcaccgtgaacaccactatttgtgccgggtattgccctactatgacccgggtgctccagggagttctgcccgcactgccccaggtggtgtgtaattatagggacgtgaggttcgaaagtatccggctgccaggatgcccacgcggggtgaaccctgtggtaagctacgcagtagctttgagctgtcagtgcgctctttgccgcagatcaaccactgattgcggaggcccgaaagatcacccgctgacgtgcgatgaccccagattccaagcttccagttccagcaaggcgcctccacctagcctccccagcccttcacgtctcccaggcccaagtgatacacccattttaccccaa

SEQ ID NO: 4544 - DNA, 1365 bp, Homo Sapiens
tatcagctgacttgctacttcaccaactgggcacaatacagacccggcctgggcagattcatgcccgacaatatagacccatgtttgtgcacccatcttatatatgcctttgcaggacggcagaacaacgaaatcacaacgattgagtggaatgacgtaaccctgtatcaggccttcaatggactgaagaataagaacagccagcttaagacattgctggccatcgggggatggaacttcggcactgcaccctttacagcgatggtgtccacaccagagaatagacagacatttatcacatccgtgattaaatttttgcgtcagtacgaattcgacggacttgatttcgattgggagtacccgggatctcgaggaagccccccgcaagacaagcatttgtttaccgtgctggtacaggaaatgagagaggccttcgaacaagaggcaaaacaaattaacaagcctcgattgatggttaccgccgccgtagcagccggtatcagcaatatccagagcggctatgagatcccccagctttcacagtacctggactatatccacgtgatgacctacgacctccacggaagttgggaaggttatacaggcgagaacagccctctgtacaagtacccaacagataccggtagcaatgcctatctgaacgttgattacgtaatgaactactggaaagataacggtgctccagccgaaaaattgattgtgggattcccaacctatggccataattttattctgagcaacccctcaaatacgggaattggtgcacctacatcaggtgccggcccagctggtccctatgcgaaagagtctgggatctgggcctactacgagatttgtacttttctgaagaacggagctacacagggatgggacgccccccaggaagtcccctatgcataccagggcaacgtatgggttggatatgataatatcaaatcctttgatatcaaggctcagtggctcaaacataacaagtttggaggggccatggtgtgggcaattgacctggacgactttacgggaaccttctgtaatcaaggtaagttcccactgatctctacactcaagaaagcactgggtctccaatccgctagttgtacggcacccgcgcagcctatcgagcccatcactgccgcaccttctggtagcggcaacggaagcggttcttctagttcaggggggagttccggcggcagcggcttctgcgccgtaagagctaatgggctgtatcctgtcgctaacaatcgtaatgctttttggcactgcgtgaacggtgttacctatcagcagaactgtcaggccggtttggtctttgatacgtcctgcgactgttgtaactgggcg

SEQ ID NO: 4545 - DNA, 705 bp, Homo Sapiens
tccgagcacgagaccagactggtggccaagctgtttaaagactactcatccgttgtgaggcctgtggaagatcaccgccaggtagtggaggtcactgtcgggctccagctcattcagctcatcaatgttgacgaggtgaaccaaatcgtcacaactaacgtgcgactcaaacagggggatatggtcgacctgccgcgcccaagttgtgtcaccttgggcgtgcctcttttctcccacctgcagaacgagcaatgggtggattataacttaaagtggaatcccgacgattatggaggcgtgaaaaaaatccatattccctccgagaagatatggcggccagacttagtgttatacaataatgctgatggcgatttcgcaatagtgaaatttactaaggtactgctgcagtacaccgggcacatcacctggacccctcctgccatttttaaatcatactgtgagatcatcgtgacgcattttccatttgatgaacagaactgttctatgaaattaggaacatggacttatgatggatctgttgtggctattaatcctgagagcgatcagcccgacctgagtaatttcatggaatctggcgagtgggttattaaggaatcaaggggctggaaacacagtgtcacgtacagctgctgccccgatactccttacttagatatcacctaccactttgtgatgcagcgattg

SEQ ID NO: 4546 - DNA, 714 bp, Homo Sapiens
gaggaggccaagcggccaccacctagggcccctggggaccctctgtcaagcccttcccctacggctcttccacagggcgggagccataccgagactgaagacaggttgttcaagcacctgtttcgcgggtacaatcgttgggcaaggcccgtccctaatactagcgacgtggtgattgtgaggttcggtctgagcatcgcccagttgattgatgtcgatgagaagaaccagatgatgaccaccaacgtatggctcaaacaggagtggagcgactataaactgagatggaatccgaccgattttggcaacattacatccctgagggtcccttccgagatgatctggataccggacatagtgctgtacaataacgcagatggcgaatttgctgttactcacatgacaaaagcccatctgttttcaaccggaactgttcattgggtgccacccgcgatatataagagttcctgctctatcgatgttacttttttcccattcgaccagcaaaactgcaagatgaaattcggatcttggacatacgacaaagccaagatcgacctggagcaaatggaacagactgttgacctgaaagactactgggagtctggagagtgggcgatcgtaaatgcaaccggcacgtataatagtaagaagtatgattgttgcgcggagatttatcccgacgtgacatatgctttcgttattcggaggctt

SEQ ID NO: 4547 - DNA, 657 bp, Homo Sapiens
aaaaacgaggaactgaggctttaccatcatctgttcaataactacgatccagggtcccgccccgtacgggaacccgaagatacagtgacaatctcacttaaagtcacccttaccaatctgatctctctgaacgaaaaggaggagacactcacaacttcagtgtggatcggaattgattggcaggactatcgcctgaattactccaaagatgattttggtggcattgagactcttcgagtgccttccgagctcgtgtggctgcccgaaattgtcctggaaaataacattgacgggcagttcggcgtagcatatgacgccaacgtcctggtgtacgaaggaggtagtgttacttggctgcctccagcaatctatcgctccgtttgtgcggtcgaagtcacctactttcctttcgactggcagaattgtagccttatttttaggagccagacctataacgcagaggaagtcgagttcacatttgctgtggataacgacggaaagacaataaataaaatagatattgacactgaggcgtacaccgaaaacggggagtgggcaatcgacttttgtccaggcgtgatacgtcgccatcatggaggcgctactgacggacccggcgagacagatgtaatatatagcttaatcatccgaagaaaa

SEQ ID NO: 4548 - DNA, 654 bp, Homo Sapiens
agaaatcaggaggagcgactcttagccgatctcatgcaaaactacgaccctaatctgcgtccggccgagagagactcagacgtggttaatgtgagtctgaaattgacattgactaacctgatttccctcaacgaacgcgaggaagctttgactacaaacgtttggatagaaatgcagtggtgcgactacagattgagatgggatccacgggactatgagggcctgtgggttctgagagtgccaagcacaatggtgtggcggcccgatatcgtccttgagaacaacgtggatggggtgttcgaagttgccctgtattgtaacgtactggtatccccagatgggtgtatttattggttgccccccgccattttccggagtgcctgctccatcagcgttacctacttcccattcgactggcagaactgttcattgatctttcaaagccagacatacagcactaacgagattgacctgcagctgagtcaggaagatgggcaaactattgaatggatctttattgaccctgaggcgttcactgagaacggcgaatgggccatccagcaccggcccgccaaaatgctgttagaccccgccgctcctgcccaagaggctggtcatcagaaggtcgtgttttatcttctcatccagcggaaa

SEQ ID NO: 4549 - DNA, 726 bp, Homo Sapiens
tcttctctcgtaaccctcaacaataacggatatgatggtattgtgatagctatcaatccctcagtcccagaggacgaaaaactcattcagaatattaaggagatggttacagaagccagcacccacttattccacgccactaagcagagggcatatttccggaatgttagtatcctgattcctatgacatacaagtcaaaaagtgagtaccttatcccgaaacaagaaacttacgaccaagccgacgtcatagttgccgatctgtaccttaaatatggggatgatccttatactctgcaatatggtcagtgcggagataagggacagtacattcacttcacaccgaactttctgctgactaataacttagctacctacggccctagagggaaagttttcgtgcacggatgggcacatctccggtggggagtattcgacgagtataatgttgatcagccgttttatatctctcgcaggaataccacggaggccaccagatgttcaactaggattactgtgtacatggtgctgaacgaatgcaagggagcgtcttgtatcgctagaccttttcgcagggactctcagactgggttgtatgaggccaagtgcacatttattcccaagcgcagccagactgctaaggagagcatcgtttttatgcaaaatttggattccgtcacagaattctgcaccgagaagacccataacaaagaggcacctaacctt

SEQ ID NO: 4550 - DNA, 378 bp, Homo Sapiens
tggtctaagcacgcaaagccagtcgcgtgcagtggcgattggctgggcgtgcgagacaagtgcttttatttctccgatgatactcgtaactggaccgcgagtaagatcttctgcagcctgcagaaggccgaactcgcccagatagatacccaggaggatatggagtttctgaagagatacgccggcactgacatgcattggattgggttgtctaggaagcagggcgatagctggaaatggactaatggcaccacttttaacggctggtttgagattattggaaacggatcctttgcttttttgtctgccgatggggtgcacagcagtaggggattcatcgatattaaatggatctgtagcaagcccaagtacttcctt

SEQ ID NO: 4551 - DNA, 237 bp, Homo Sapiens
gccctcccgcagtataagaagaaaatcactgatcgttgctttcaccattctgaatgctacagcggatgttgccttatggacctggattctggcggcgccttctgcgcccctcgcgcacggattacaatgatctgtctgccccagactaagggcgccaccaacataatctgtccctgccgcatgggcttaacgtgtatatctaaagacctgatgtgctccagacgatgtcacatgatc

SEQ ID NO: 4552 - DNA, 381 bp, Homo Sapiens
gaactgtgtcaacccggagcggaaaatgccttcaaggtgagactgtcaatccgaactgctctgggggataaagcatatgcgtgggacacaaatgaggaatacctctttaaggccatggtggccttcagcatgcggaaggtccccaatagggaagccactgagatcagccatgtattgctctgcaacgttactcagcgagtcagcttttggtttgtagtaaccgatccgagtaaaaaccatacacttccagcagtcgaagtgcagtctgctattagaatgaacaaaaatcgaatcaacaacgcatttttcttaaatgatcagaccctggagtttctgaagattcccagcaccctggccccacctatggatccctccgtccct

SEQ ID NO: 4553 - DNA, 1338 bp, Homo Sapiens
gctcctacgtggaaggacaaaactgctatcagtgagaacctgaaatcatttagcgaggtcggcgagattgatgcagacgaagaagtcaagaaagccttaaccgggataaagcagatgaagatcatgatggagcgaaaagagaaagaacacaccaacctgatgtcaacattgaagaaatgtagagaggaaaagcaggaggcattgaagctcttaaatgaagtgcaggagcacctcgaggaggaagagcgtttgtgccgtgaatccttggctgattcttggggagaatgccgaagctgtctggaaaacaattgtatgagaatctatactacctgtcaaccttcctggagttctgtgaagaacaagatcgagcggttcttccgcaagatctaccagttcctgtttccattccacgaagacaacgaaaaggacctgcccatttctgaaaaattaattgaggaagatgctcaattgacacagatggaagatgtcttctcacagcttacggtcgacgtgaacagtttgtttaatagatcatttaacgtgtttcgccagatgcagcaagaattcgatcagaccttccaaagtcattttatatctgacacagatctgactgagccttactttttcccggccttctccaaagaacccatgactaaggcagatctcgagcagtgttgggacattcccaactttttccagcttttttgtaacttttctgtaagtatttacgagtctgtctctgaaacaataacaaagatgctgaaagccatagaggatctgccgaaacaggacaaggctcctgatcatgggggactcatctcaaagatgcttcccggccaggaccgcgggctgtgcggcgagcttgatcaaaacctgtctcgatgttttaagtttcatgagaaatgtcaaaagtgccaggcccacctctcagaagactgccctgacgttcccgcactccacactgagctcgacgaagcaataaggctcgtgaatgtgtccaaccagcagtacggccagatcctgcagatgaccagaaaacacctcgaagacactgcttacctggtggaaaaaatgaggggtcagtttggatgggtgtctgagttagctaaccaggcccccgagaccgagattatctttaactccatccaggttgtccctcgcattcacgagggcaatattagtaagcaggatgagacaatgatgactgatttgtctatcctccctagctccaattttacccttaaaatccccttggaggaatctgcagaaagtagcaacttcatcggctatgtggtcgccaaggccctgcagcactttaaagagcactttaaaacctgg

SEQ ID NO: 4554 - DNA, 1578 bp, Homo Sapiens
gaaggtgcagcgccaattgctattacttgcttcacgagaggacttgatatccgcaaagagaaggctgatgtcctctgtcctgggggatgccccctggaagaattctcagtttatggcaatattgtgtacgccagtgtgtcctctatttgcggggctgccgtccataggggcgtgattagcaacagcggcggtccagtccgagtgtactctctgccaggccgcgaaaactattccagcgtggacgccaacggaatacaatcccagatgctctctcggtggtccgcttcctttactgttacaaaaggtaaaagcagcacacaggaggcaactgggcaggctgtcagtaccgctcatccaccgacagggaagagactcaaaaagactccggagaaaaaaactggaaacaaggactgcaaggctgatatcgccttccttatcgacggatctttcaatatcggacagcgcagattcaatctgcagaagaactttgtcgggaaagtggccctgatgctcggaatcgggacagaaggtccccacgtggggctggtacaggcatcagaacatcctaaaatagaattttatctgaaaaacttcacaagcgctaaagatgttcttttcgccattaaggaggtcgggtttagaggcggcaattcaaataccggcaaggcactcaaacacacggcccaaaaattctttaccgtggatgcaggcgtaagaaagggcattcctaaagtagtggttgtgtttatcgatggctggccttccgacgacatcgaagaagcgggaatagtcgcccgagagtttggagttaacgtgttcattgtgtctgtcgcgaagccaatcccagaggaattaggaatggtgcaggatgtaacatttgtggataaagccgtatgtcgaaataatggattctttagttatcatatgcccaattggttcggcaccacaaagtatgtgaagccccttgtgcagaagttatgtactcacgaacagatgatgtgctctaagacatgttacaatagcgtgaacatagcttttctcattgatggcagcagctccgtgggggattccaacttcaggctgatgctcgaattcgtttctaatatcgccaaaacattcgagattagcgatattggcgctaaaattgctgccgtgcagttcacatatgaccaacgaactgagtttagtttcacagactacagcaccaaggagaacgtgctggcggtcattaggaacattcggtacatgagcggaggcacggcaaccggagatgctatttccttcactgtgcgaaacgtgtttggtcccatccgggagtccccaaacaaaaacttcctggtcatcgttacagacgggcagagttatgacgatgtgcaggggccggcggctgcggcacacgatgccggcatcaccatattctccgtgggggtagcatgggctccactggatgacctgaaagacatggcctcaaaacccaaggaaagtcatgcatttttcacacgcgagttcactggcctggagcccatcgttagcgatgtgatcagaggaatttgccgggattttctggagagccagcag

SEQ ID NO: 4555 - DNA, 1263 bp, Homo Sapiens
accggatttctgtaccccttcagcgcagccgccttgcagcagcacggataccctgaacccggcgcggggtcccctggtagcggatatgcgtcacggcgccattggtgtcatcacactgtgacccggactgtcagctgtcaggtgcagaacggcagcgaaacagtggtgcagcgggtgtaccaatcctgccgatggcccggcccttgtgccaacctggtgagttaccgtactttgataagacccacctaccgagtgagttaccgcacggtaaccgtgctggagtggcgctgttgtcccggcttcacaggaagcaattgcgacgaggaatgtatgaactgcacacgcctgtctgacatgagtgagcgccttaccactctcgaggcaaaggtgctgctgctcgaggcagcggagaggcccagttcacccgacaatgatctgcccgcaccagaatctacgcccccgacttggaatgaggatttcttgcctgatgccattccactcgctcaccctgttccacggcagcgtagacctacaggacccgccggccccccagggcagaccgggcccccaggcccagccggcccccctggctcaaaaggcgatcggggccaaactggcgagaaagggcctgcaggaccgcccggtctgctggggccccctggaccccgtggcttaccaggtgagatgggccgccctggcccgccggggcctcctggccccgctggaaatcctggccccagtcctaatagtccgcagggagcactgtatagtctccagccgcctacagataaggacaatggagactctagactggctagtgctatcgtggataccgtactggctggagtgccagggccacgcgggccccctggccccccaggtccccccgggccgagaggcccacctggacctcctggtacgccgggctctcagggcttggctggcgagagaggaacagtaggcccaagcggagagccaggcgtgaagggcgaagaaggagaaaaggcagccaccgctgaaggagagggagttcagcagttgcgggaggccttaaagattttagcggaaagagtcctgattctggagcatatgattggcatccacgacccactcgcgtctcctgagggcggctccggccaggacgccgcgctgcgagcaaatttgaaaatgaaaagaggtggagcacaacctgacggggttctggcagctctgttggggcctgacccaggtcaaaaatcagtggaccaggcaagcagtaggaaa

SEQ ID NO: 4556 - DNA, 1611 bp, Homo Sapiens
gatcagtgcaacgttcccgaatggctgcccttcgctagaccaactaaccttaccgacgacttcgagtttccgatcggcacttatctgaactacgagtgccgacctggctattcaggccggccattcagcattatctgcctgaagaattcagtctggacgtcagcgaaggataagtgtaagagaaagtcttgccggaacccccctgatcccgtcaacggaatggcgcacgtgattaaggacatccagtttaggtcacagatcaaatacagttgcccgaaagggtacaggttaataggctcaagcagtgcaacctgcatcatcagtggaaacaccgtgatctgggataataagactcctgtgtgcgacaggatcatttgtggtcttcctccaacaattgccaatggggatttcacttctatctcaagagaatacttccattacggatcagtggtaacataccactgtaatcttgggtcacgtgggaaaaaggtgttcgagcttgtcggcgagccaagcatctattgtacatccaaggacgatcaagtcggcatctggtcagggcctgctccccaatgtataatccctaacaagtgtacgccacctaacgtagaaaacggtattcttgtatctgataaccgaagcctcttcagtctgaatgaagtggtggagttccgctgccagccggggttcggaatgaaagggccctctcacgttaaatgccaagccttaaacaagtgggagcccgaattacctagctgctcccgggtgtgtcagcctcccccagacgtcctgcacgccgagagaacccagcgtgacaaagacaatttttcccctggacaggaggttttctatagctgtgagcctggatacgaccttagaggaagtacgtacctgcactgcacaccacagggggattggagtccagccgccccccgttgtgaagtgaagtcctgtgacgatttcctcgggcaacttccaaatggacacgttctctttcctttgaacctgcagctcggtgctaaggttgactttgtttgcgacgaggggttccagctcaagggatcctccgcctcctattgtgttctggcgggaatggagagcttgtggaattcatccgtaccagtgtgcgaaaggaaatcatgtgagactccacctgttcccgtgaacggcatggtgcatgttataaccgacattcatgtgggcagtcgtatcaattattcttgcaccacaggccaccggcttatagggcacagctccgcagagtgtatcctgagtggtaacacagcccactggagcatgaaaccgccgatctgtcagcagatcttctgcccaaaccctccagcgatcctgaatggcagacataccggcaccccactgggagacattccttatgggaaagaggtctcatacacatgcgatccccaccccgacaggggtatgacctttaacttgattggcgagagcacaatccgacgcactagtgagccccatggaaatggggtgtggagttcacctgcccccagatgcgagttgcctgttggtgcaggttcccacgacgccctgatagtaggcaagttttacgaggtctttgccgaagaattttgtcatctt

SEQ ID NO: 4557 - DNA, 684 bp, Homo Sapiens
aagaagaaaagcgcccgggatcagttcaataagctggtgacagatctccccaacgttcaggaggagatcgtgaatattcacaatgctctgaggcgacgggttgtgcctcccgcatccaacatgctgaaaatgagttggtccgaagaggcggctcaaaatgccagaattttttccaaatattgtgacatgacagagtctaacccacttgaacgacggctgcccaacactttctgcggtgaaaatatgcacatgactagctatccagtctcttggtcaagtgtcatcggagtgtggtattccgaatccacaagctttaaacatggggaatggaccaccactgacgatgacataaccactgatcactacacgcaaatagtttgggccacttcttatctgatcggctgcgcaatcgcttcctgccgtcagcagggatccccaaggtacctgtatgtgtgccactattgccatgagggcaatgatcctgaaaccaagaacgagccttataagacaggcgtgccctgtgaggcatgcccttcaaactgtgaagacaaactttgtaccaacccttgcatttactacgatgaatacttcgactgtgatattcaggtgcactatctgggttgcaaccactcaactaccatccttttttgcaaggccacctgcctgtgcgacactgaaataaag

SEQ ID NO: 4558 - DNA, 378 bp, Homo Sapiens
ggacccagccccgacacttgttcccaagaccttaatagtagagtcaagcccggcttcccgaaaaccataaagaccaacgatccaggggtcctccaggctgcccgttattccgtcgagaaatttaacaactgtaccaacgatatgttccttttcaaggagagccggatcacaagggctctggtccaaatcgtgaaaggtctgaaatatatgctggaagtcgagatcgggaggacaacatgtaaaaaaaaccaacacctcaggctcgatgactgtgattttcagactaatcacaccctgaaacagaccctgtcatgttactctgaggtttgggtagtgccatggctgcagcacttcgaagttccagttttacggtgtcac

SEQ ID NO: 4559 - DNA, 357 bp, Homo Sapiens
tggcggtttcaagaggaagaggagtggaatgaccagaagcagatcgccgtgtatctcccaccgacactggaattcgcggtctatacctttaataagcagtccaaagattggtacgcctacaagcttgttccggtgctggcctcctggaaggagcagggctatgataagatgactttcagtatgaatcttcagttaggcaggacgatgtgtggcaagtttgaggacgacattgacaactgcccgtttcaggagagtcctgaattaaacaatacatgcacgtgtttttttaccattggtattgaaccctggcgcacgaggttcgatttatggaacaaaacttgtagtggtggacactca

SEQ ID NO: 4560 - DNA, 276 bp, Homo Sapiens
cgacggtttcagaggaacacaggggaaatgtctagcaattccactgcgctggccctggttagaccaagcagcagcggacttatcaacagtaataccgataacaatttggctgtttatgatctgagccgagatatcttgaacaattttccacacagtatcgcaaggcaaaaaaggatcctggtcaatctgtccatggtggaaaataagctggttgaactcgaacacactttgctctcaaaaggatttcggggcgcatctccccaccgaaaatctaca

SEQ ID NO: 4561 - DNA, 603 bp, Homo Sapiens
atgtcccggagggagggctccctggaggaccctcagacagactcttctgtgagtttacttccacacttggaagcgaagatcagacagacccattcacttgcacaccttcttacaaaatacgcggagcagcttcttcaagagtatgttcagctgcaaggagatcccttcggtttgcctagctttagtcctcctaggctgcccgttgccgggctcagtgcaccagcgccttcccatgccggtttacctgtccacgaacgtctgcgattggatgcagccgctctcgcagctttgcctccccttcttgatgccgtttgtcggcggcaagcagagctgaacccccgagcccctaggctgttgcgccgactggaggatgcagctaggcaggcccgggctcttggagccgccgtggaagcactcctggcagcccttggtgctgcaaaccgcggaccacgtgccgagccgccagccgcaaccgcttctgccgccagtgctacgggcgtcttccctgccaaggtccttgggctgcgggtttgtggactgtatcgcgagtggctcagcagaactgagggggatctgggtcagctcctgcctggcggctctgca

SEQ ID NO: 4562 - DNA, 642 bp, Homo Sapiens
gctccgccggagtgggactggagatctaaaggcgcagtgacaaaagtgaaggatcaggggatgtgtggctcttgctgggctttctctgtgaccggcaacgtggaaggacagtggtttcttaatcagggaacactgctgagcctgtccgaacaggaattacttgattgtgacaagatggataaggcctgtatggggggcttaccctcaaatgcctattctgccatcaaaaacctggggggcctcgagacagaagatgactacagttaccaggggcatatgcagagctgcaacttttccgcagaaaaagctaaagtatatatcaatgattcagtagagttatcccaaaacgagcaaaagctcgccgcttggctcgcaaaacgcggtcctatttccgtggctataaatgccttcggcatgcagttctatcgtcacggcatttctagacccttgcggccactgtgtagcccctggctgattgaccacgcagttctgctcgtgggttatggaaacagaagtgacgtccctttctgggcaattaagaactcctggggcacagattggggggagaaggggtattactacctccaccgagggtcaggtgcatgcggggtcaacacaatggctagcagtgcggtcgtggac

SEQ ID NO: 4563 - DNA, 651 bp, Homo Sapiens
ttgccagactctgtcgattggagagagaagggctgcgtgaccgaggtgaagtatcaaggtagctgtggtgcatgctgggcctttagcgcagtgggggctctggaggctcagctgaagctcaagacaggaaagctggtttccctttctgcccagaatttggtagattgttcaacagagaagtacgggaacaagggctgtaacggcggtttcatgaccacagcctttcaatacattatcgacaacaagggaattgatagcgacgcatcatacccctacaaggccatggaccagaaatgccagtacgattccaagtatagggccgccacttgcagcaagtacaccgagctgccatatggtcgggaagacgtgcttaaggaggccgttgctaataagggaccagtttctgttggtgtcgatgcgaggcatccctcttttttcctgtatagatctggggtttactatgaacctagctgtacccagaatgtgaatcacggagtactcgtagtgggctacggcgacctgaatgggaaggaatactggctggtcaagaattcttggggacacaactttggagaggagggatacattagaatggcacgaaataagggtaatcactgtggtattgcctcctttccctcttacccggagatc

SEQ ID NO: 4564 - DNA, 747 bp, Homo Sapiens
gtcccattcagttgtgattggcgaaaagtggccagcgccattagtcccatcaaagatcaaaaaaattgtaactgctgctgggctatggcggcggctggcaatatcgagacactgtggcggatatctttttgggacttcgtggatgtatccgtccaggagctcctggactgcggacgatgtggggacggttgccacgggggattcgtgtgggatgctttcattaccgttctgaataactccggcctcgcttccgagaaagattaccccttccagggtaaggtgcgggctcaccggtgccaccctaaaaagtatcagaaggtcgcctggatccaggattttattatgctccagaacaatgagcatagaatcgcccagtacctcgctacctatggcccaatcacagtgacaatcaacatgaagccccttcagctctaccgcaagggtgtcattaaagctactcccactacctgcgacccacaactcgtggatcactccgttcttctcgtagggtttggcagcgtgaagtccgaagaaggtatatgggccgagacagtgagcagtcagagtcagccgcagcccccacaccctacaccgtactggattttgaagaatagttggggcgctcaatggggggaaaaggggtacttccgtctccatcggggatcaaatacatgcggaataaccaagtttcctctcacggcccgcgtgcagaaacctgatatgaagcctcgcgtctcttgtccacca

SEQ ID NO: 4565 - DNA, 441 bp, Homo Sapiens
cggctgctgctgttgcccagggtgttgttgactatggcttccggaagtccaccgacccagccgagccctgcatccgatagcgggtccggatacgttcctggatctgtgagcgcggcttttgtgacctgccccaacgagaaggtagcgaaagaaatcgcacgggcggtagtggagaagcggctggcagcttgcgtcaatctgatcccgcaaattacctccatctatgagtggaagggcaagatcgaggaggatagcgaggtgttgatgatgataaaaacacaaagcagcttagtcccagcactgacggatttcgtgaggagcgtgcatccctatgaggttgcagaagtaattgccctgccagtcgagcagggcaacttcccatacctgcagtgggttaggcaagtaactgaatcagtcagcgatagcatcacagtcctgccg

SEQ ID NO: 4566 - DNA, 579 bp, Homo Sapiens
ctgcatcttgatgttcagaggggccgtagggtctcaccaggatgtcctatagtcggtacacatgtatgccccgtgagggtgcagcaggagatcgacgacgtgattggccaggtgagaagacctgagatgggcgatcaggctcatatgccctgtacgaccgcagtgatccatgaggtgcagcatttcggcgacattgtgcccctcggagtcacccacatgaccagtcgcgacatcgaagtgcagggcttccgcatcccaaagggcaccacactgattactaacctgagttccgtcctgaaagatgaagccgtctggaagaaaccattccggttccaccctgaacatttcttagacgcccagggccacttcgtgaagcctgaggcatttcttccattcagcgccggacgtcgcgcttgtctgggggaaccgttagctaggatggaactctttttgttttttaccagcttactgcagcacttctctttctccgttgctgccggccagccacgcccatctcactctcgcgtggtcagcttcctcgttactccttcaccttatgaattatgtgccgtcccccga

SEQ ID NO: 4567 - DNA, 273 bp, Homo Sapiens
tatgacccagaggctgcctccgccccaggatccggtaacccctgtcatgaagctagcgcagcacagaaagaaaacgcaggggaagatccagggctggccaggcaggctccgaagccgagaaagcagaggtcctcattgctggagaaggggcttgatggagccaagaaagcagtaggcggcctcggtaaactggggaaagatgcggtggaggacttggagagcgtggggaaaggcgcagtccatgacgtaaaagacgtgttggactccgtcctc

SEQ ID NO: 4568 - DNA, 273 bp, Homo Sapiens
aattggtacgtcaaaaaatgtttaaatgacgtgggaatctgcaaaaagaagtgcaagcctgaggaaatgcacgttaaaaacggatgggccatgtgcggcaaacagagagactgctgtgtgcccgcagataggcgcgcaaattaccccgtattttgcgtacagacgaagaccacccggatcagcactgtcacggccacgacagcaacgaccactcttatgatgacaaccgcttctatgtcctccatggctcctacacccgtcagtcctactggc

SEQ ID NO: 4569 - DNA, 225 bp, Homo Sapiens
gcccggcttaagaagtgttttaataaagtgacagggtattgccgcaagaagtgcaaagtgggcgagcggtatgagattggatgtttgagcggaaagctctgctgcgctaacgacgaggaagaaaaaaagcatgtgtcattcaagaagccgcatcagcactcaggggaaaaactctcagtgctgcaggattatattattctgccaaccattacgattttcaccgtg

SEQ ID NO: 4570 - DNA, 696 bp, Homo Sapiens
tggaattacctcttcgactttcatccacaccgagtgctggtggtaggggccttcgcgaatttttgtacagaacccactggctgctcctgtctgttccctaaactccctccacacctcttaatgctcccatgctggtttcacctgcttttttttcaagactatatcatgtctggggctagcgccctgccaccaggtttggtgagcttcgtcaaagctccattgccacagtggtggcccggcggctgcccaggcgtcggcggaccactccaggctctggaggccaaaccaggccaactcagtctgccgatccgcaaccaaaagagactggtgaaatctgcacttgaactgggggaaaacgagctgtttcagcagtttccgaaccctcagtcaagctgggtgcagcgaacacaggaagctctgcgtccgttactgtcagttgcgctgcagctgtttcttgggcgcagggggctccctcttccttttagagcaccgattaggaccgttgtcggaagcgcaatccctgttcaacagtccccgcccccttcccccgcgcaggtggacacactgcaggcccggtatgtcgggagacttacacagctcttcgaggaacatcaagcccggtacggcgtaccagccgaccgtcacctcgtgttgaccgaggctagacccactgcctggcccagactcagtgcggga

SEQ ID NO: 4571 - DNA, 690 bp, Homo Sapiens
ctggtacaacagggccttaaggtggtggggtgcgccagaaccgtggggaatattgaggagttggccgccgaatgcaaatctgcggggtatccgggaacactgatcccttatcggtgtgatctttctaatgaggaagacattctgtcaatgttcagtgcgattagatcacaacatagcggcgtggacatttgcatcaataacgccggtctggcacgcccggatacactgttgagtggaagcacaagcgggtggaaggacatgttcaacgtaaatgtcctggccctgtctatctgtacccgcgaagcctatcagtcaatgaaggaacgcaacgtcgacgacggacatattattaatattaacagtatgtccggccatcgtgtgctgcccctttctgtgacgcatttctactcagctaccaagtatgcagtaactgcactgacggaggggctgagacaagagctgagggaggctcaaacccacatccgtgctacgtgtatttcacctggagtggtcgagacccagtttgctttcaagctgcacgataaggatcccgagaaagccgcggccacttatgaacagatgaagtgtctcaaacctgaagatgtcgccgaggcagtcatttacgtgcttagtactccagcacacattcaaatcggtgatattcaaatgcggccaactgaacaggttaca

SEQ ID NO: 4572 - DNA, 1056 bp, Homo Sapiens
cccccttgtgggggaatggggaatctgcggggccgcacagctgtagtcacaggcgctaactccgggattggtaagatgacagccctggaactggcacggcgtggagctcgtgtggtcctcgcttgcaggtctcaggaacggggggaggcagccgcgttcgaccttcgtcaggaatccggcaataacgaagtgatctttatggcgttggatctggcgtccctcgcttccgtccgtgccttcgcgaccgcctttctcagctctgaacctcgacttgacatcctgattcataacgccggcatctcaagttgcgggcgaaccagggaggccttcaacctcttattaagggtcaaccatatcgggccctttctcttaactcatctgctgctgccttgccttaaagcctgcgccccatctcgtgtagtcgttgttgcatccgccgcgcactgtcgcggccgattggactttaaaagattggatcgtcccgttgtgggttggaggcaagaactgcgggcatacgccgacacaaagctggccaatgtgttgttcgcgcgggaactggctaatcagctggaagccacaggagtgacatgctacgccgcacatcctgggcctgtcaactccgaactgtttctgagacacgttccggggtggctgcggcctcttctgcgacccctggcctggttggtacttagggctccaagaggaggtgctcagactccactctattgtgctcttcaagagggcatcgagcctctctcaggccgctacttcgcaaactgccatgtggaggaggtacctcccgcagcaagagatgacagggccgcgcacaggctctgggaggcctctaaacgccttgcaggactcggcccgggtgaagacgccgaaccagacgaagatccacagtctgaggattcagaagcaccaagctcactgagtaccccacaccccgaggagccaacagtgtctcaaccctacccaagtccacagagcagtcccgacttgtccaagatgacccacaggattcaggccaaagtggagcccgaaattcagttgtcc

SEQ ID NO: 4573 - DNA, 630 bp, Homo Sapiens
agaatgactcgacgggaccccctgaccaataaagtggcactggttacagcgtcaacggatggcatcggctttgccatcgctagacgtctggctcaagacagagcccacgtcgtggtttccagccgcaagcagcaaaacgtggatcaggcggtggcgacgcttcaaggagaaggcttaagtgttacaggaacagtgtgtcacgtcgggaaggccgaggacagagagcgcttagtggccatggcagtgaagctgcacggaggcattgatatcctcgtttctaatgctgcagtgaatccgttctttggctccttgatggatgtgaccgaggaggtctgggataagacccttgacatcaatgtgaaagcccccgcacttatgacaaaggcagtagtgccagagatggagaaacgaggaggcggatctgtcgtaattgtctcctcaattgcagcattctccccgtctccagggttttccccttacaacgtctctaagacagcgctcctcgggcttaataacaccctcgcgatcgagctggcaccgagaaatattcgggtgaattgtctgcacctggacctgtccaggctggctagcgctggctgcagtggatggaccaggaagaaacgcaaagca

SEQ ID NO: 4574 - DNA, 906 bp, Homo Sapiens
agaaaaggcaagcttaagatcgaggatataaccgacaagtacatcttcattaccggctgtgactcagggtttggaaatttggcagcccgaactttcgataaaaagggcttccacgtaatcgctgcttgcctcaccgagtctggatccaccgcactcaaagccgagacgtccgaacgacttcggaccgtgctgctggatgttacagacccggaaaacgtcaagaggacagcccagtgggttaagaatcaggtcggggagaaagggctctggggcctcataaataatgccggggtccccggtgtgttggcccccaccgactggctcacactggaggactatagagaaccaattgaagtcaacctgttcggcctgatttctgtgactctgaatatgttgcctctggtgaaaaaagcccaaggcagagttattaacgtttcttctgtggggggccgcctggcgatagtcggaggggggtacactccatctaaatatgccgttgaaggcttcaatgattccctgcgccgagacatgaaggcgttcggcgtgcatgtctcatgtattgagccagggttgtttaagactaacctggcagaccctgtgaaagtgattgaaaaaaagttagccatttgggagcagctgtccccagatataaagcagcagtacggagagggatacattgaaaagtctctcgacaaactgaaaggtaataaatcttacgtcaatatggacctttcccccgtggtggaatgtatggaccatgcacttacctccctgtttcctaagacccattatgctgcggggaaagatgctaagattttctggatccctttatcacacatgcccgccgctcttcaggactttttacttttaaagcagaaggctgagctggcgaaccctaaggcagtg

SEQ ID NO: 4575 - DNA, 1206 bp, Homo Sapiens
cttccagcctcttccctgagctctcttgtgccgcaagtgcgaacctcttataatttcggtcggacgtttttgggcttggataaatgtaatgcctgcatcggaacctctatatgcaagaaattctttaaggaggaaatccgtagtgacaactggctggcctctcacctgggcctgccacccgatagcttattatcctaccccgcgaactactccgacgacagcaagatttggaggccagttgaaatctttagactggtttcaaagtatcagaacgagatcagtgatcggaggatctgcgccagtgcctctgccccgaagacatgctccatcgaaagagttctccgaaagactgagcggttccagaagtggctccaagccaagagactgactcccgatttggtgcagggacttgcctcacccctgttgaggtgtccttcccagcgacttcttgaccgtgtcgtgagaaggtatgctgaggttgctgatgcgggaagtatctttatggaccacttcacagaccgagataaactgcggctgctttataccctggctgtaaatagccaccctatcctcctgcagatctttccaggcgctgagggctggccactgccaaagtacttgggctcatgtggtagatttctcgtttccacgtccacccggccccttcaagaattctacgatgctccgcccgatcaggccgccgatttagcctaccagcttctcggtgtcctggaatccctccgcagcaacgacctgaattactttttttatttcactcatattgacgcagggatgttcggagtcttcaacaacggtcacttgttcatccgcgatgcatctgccgtcggagtgatcgacaagcaggagggatctcaggaggctaatagagcgggagaaaacaaggacatcttttcctgcctggtgagtggctgtcaagcccagctgccctcttgcgaaagcatctcagagaagcagagcttggtcttagtgtgtcagaagttacttcctaggctgttgcagggccggttcccaagtcccgtgcaggacgacatcgatagcattctggtgcaatgcggggattccattcggcctgatccagaagtcctgggcgcggcaagccagcttaaagatatcttaaggcccttgcggacgtgcgattcccgcttcgcctatcgctacccagattgtaagtataacgacaaattt

SEQ ID NO: 4576 - DNA, 1293 bp, Homo Sapiens
gcttacactacccccgggcccccacgggcactcacaaccctcggcgccccacgggcacacacaatgcctgggacttatgctccgagtaccaccctcagcagcccttccacccagggcttgcaggaacaggctcgggcgctcatgagagatttccctctcgtggacgggcacaatgacctgccccttgtgctgagacaagtgtaccagaaggggcttcaggacgtcaacctccgcaacttttcttatgggcagacatcattagaccgcctgcgcgacggtctggtgggcgcccagttctggagcgcgtatgtcccgtgccagacacaggaccgtgatgccctcagacttacattggagcaaattgatctgatccgacgcatgtgcgcaagctatagcgaattggaacttgtcacctccgcaaaagctctgaatgatacgcaaaagctggcctgcctcataggtgtggaaggcgggcactcattggacaacagcctgtcaattttacggactttttacatgctcggagtgcgctatctgactttaacgcacacttgtaataccccttgggctgagtcatcagccaagggagtacactctttctacaacaatatcagcggactgacagacttcggcgaaaaggtagtggctgaaatgaaccgcctgggcatgatggttgatctttctcacgttagtgatgccgtggcgcggagggccctggaagttagccaggctccggtgatcttctcccatagcgcggctcggggagtgtgtaattccgcaagaaatgtcccagacgacattctgcaacttctcaagaagaacggcggcgttgttatggtctcattatctatgggagtcatccagtgcaacccctccgcaaacgtatccaccgtggccgaccactttgaccacatcaaggccgtgatcggctcaaagtttatcggtattgggggtgactatgatggtgctgggaaatttccccaggggcttgaggatgtcagcacctaccccgtgttgattgaagaattactttctcgggggtggtccgaggaggaactccagggggtacttcgagggaatctcctcagagtctttagacaagtagagaaagtccaagaagaaaacaagtggcagagtccactggaagacaagttcccagatgagcaactctcaagcagctgccactcagatttaagccgactccgtcagcggcagagcctgacgtctggccaagagttaaccgagattcccatccattggacagcaaaactgcccgcaaagtggagtgtgagt

SEQ ID NO: 4577 - DNA, 972 bp, Homo Sapiens
ggtgcgctggcacctggaacaccggcacgcaatctgcctgagaatcacattgatctgcctgggcctgctctgtggacccctcaggcttcccaccatcggagacgcgggcctggtaagaaagagtggggtcctggtctgccatcccaagcccaagatggcgcagtggtgaccgccactagacaggcctcccgcctgcctgaggcggagggtctgctgcccgagcagtcccctgccgggttgctgcaggacaaagacctgctcctcggcctggctctgccttatccagagaaggagaatcgaccccctggctgggagaggacaagaaagaggagccgcgaacacaaacggcggcgagaccgcttgaggctgcatcaggggcgcgcccttgtgcgaggcccttccagcctgatgaaaaaggctgagctgagtgaggcccaggtgctggatgctgcaatggaagagagcagtacctctcttgccccgactatgtttttcctgactacctttgaggccgcaccagccacagaagaatctctgattttgccagttacgagtcttcgtcctcagcaggctcagccccggagcgacggggaggtcatgcccacgctggatatggcacttttcgactggacggattatgaggacctgaagcccgatggctggccatcagcgaagaagaaggagaaacatcggggcaaactcagttctgacgggaatgagacctcacccgctgaaggagagccttgtgatcaccatcaggactgtcttcccggcacctgctgcgatttaagagaacacttgtgcacaccccataatcggggcctgaacaacaaatgcttcgatgattgcatgtgcgtcgaaggtctgaggtgttacgcgaaattccaccggaatagacgagttacccgcagaaaaggacgctgtgtggaaccagaaacagcaaacggcgaccaaggaagcttcattaatgtg

SEQ ID NO: 4578 - DNA, 228 bp, Homo Sapiens
ctggttaataataagggcagcgcaaattcatccattgtgatccaactgagtactaacgatggcgagtgcgtgacggttaaacccggaactccgagccccgcctgcccaccgactatgaccacgacctctactgtccctgcaagtaccgcaactgaatccactacctccaccgctacagccgctacaacatccactgagccaatcacagtagcaccaactgaccatttg

SEQ ID NO: 4579 - DNA, 435 bp, Homo Sapiens
ctgagacatgtcgtctactggaattcaagtaatccaaggctgctccggggtgatgctgttgtggaactgggacttaacgactacctggacattgtctgtccgcattatgagggccctggccctcctgagggacctgagacttttgcgctctacatggtggattggcctggatatgaaagctgtcaggcagagggtcctagggcatacaagcgctgggtgtgcagcctgccctttgggcatgtccaatttagcgagaaaattcagaggttcacacccttctcccttggtttcgagtttctgccgggtgagacttattattacatctctgtgcctaccccggagagctccggccagtgtttgcggctgcaagtgtctgtctgttgtaaggagaggaaatctgaatccgcccaccccgttggaagccccggggaaagt

SEQ ID NO: 4580 - DNA, 1437 bp, Homo Sapiens
cgcctggtcggagaggaagaagccggctttggtgagtgtgacaaatttttctatgccggaaccccaccggctggtttggcggcagattctcatgtgaaaatttgccagcgggcagagggcgccgagaggtttgccacgctgtacagtacccgggaccgaatccccgtgtatagtgcgttccgtgccccaagaccagcgcctggtggtgcagagcagcggtggctggtggagcctcaaatcgacgatcccaacagtaatctcgaagaagccataaacgaagccgaggccatcactagcgtgaactcactcggctctaagcaggctctgaatactgattacctcgacagcgactaccagagaggacagctgtatccattttccctctcctctgacgttcaggtggctacttttacgttaaccaattctgctccaatgacccagtcctttcaggagaggtggtacgtgaacttgcactcattgatggacagagccttaactccccaatgcggcagtggcgaagacctctatatcctcacagggacagtccccagtgattatagagtcaaggacaaggtcgccgtccccgaattcgtgtggttagcagcctgttgcgcggttccaggaggggggtgggctatggggtttgtgaagcataccagagactcagatataattgaagacgtgatggtaaaggatctgcagaagctgctgcccttcaatccccagctgtttcagaacaactgcggggagaccgagcaagacactgaaaagatgaaaaagatcttagaggtggttaatcagatccaagatgaggaaaggatggtccagtcccagaagtctagctcacccctgtcaagcacccgtagcaaaaggagcaccttgctcccccccgaggcctccgagggctcttcaagcttcctgggaaaattaatggggttcattgccacccccttcataaagcttttccaactgatctattatcttgtggtggctatcctgaaaaatatcgtgtattttttgtggtgtgttaccaaacaggttattaatggtattgaatcctgtctctacaggctcggcagcgcaacaatctcatattttatggccattggggaggagttggtgtctattccttggaaagtgttgaaggtcgtggccaaagtgattcgcgcactgttgcggattctttgttgcttgcttaaagcaatctgccgggtgctcagcatccccgttcgagtgcttgtggatgtcgcgactttccctgtgtacactatgggagccattccaattgtctgcaaggacatcgctctcggcctgggcggcacagtcagtctgctgtttgacaccgcatttggcaccctcgggggcctctttcaggtagtgttctcagtttgcaagaggataggctacaaggttacttttgacaattccggcgaactc

SEQ ID NO: 4581 - DNA, 1176 bp, Homo Sapiens
ggtaaaattgagagttgcgcctctaggtgcaatgagaagttcaatcgcgatgccgcttgtcaatgtgatcggagatgcttgtggcatggaaactgttgtgaggactacgaacacctgtgtaccgaggatcacaaagaaagcgaacccctgcctcagctcgaggaggagaccgaagaagctctcgctagcaacttatattccgctcctacctcctgtcagggtcgctgttatgaggcctttgataagcatcaccagtgccactgcaacgcccgctgtcaggagttcggcaattgctgtaaggatttcgagtctctctgctcagatcatgaggtgagccactcctccgacgccattaccaaggaggaaatccagtccatctctgagaagatttatagagcggacaccaacaaagcccagaaagaggatatagtgttgaactcccaaaactgtatatccccttcagagactcgcaatcaagtggaccgttgcccaaaaccactctttacatacgtgaacgagaaactgttttccaagccgacctacgccgcttttatcaacttgctcaacaactaccaaagggccacggggcacggtgaacatttttctgcccaggaattagccgagcaggatgcattcctcagagagattatgaagaccgcagtaatgaaggagttgtatagttttctccaccaccagaaccgatacggttctgagcaagaatttgtggacgatctgaagaatatgtggttcggcttgtactcccggggcaatgaggagggagatagctccggtttcgaacacgtcttcagcggcgaggtaaagaaggggaaggtcacgggcttccataattggattagattctatcttgaggaaaaggaggggctggtcgactattactctcacatctacgacggcccctgggatagttatccggacgtgctcgccatgcaatttaactgggacggctactacaaagaagtgggtagcgctttcatcggcagtagtccagaatttgagtttgcattgtacagtctgtgttttatcgccagaccaggtaaagtctgccagctgagccttggaggatacccactggccgtgcggacctatacatgggacaagtccacgtatggcaatggtaaaaaatatatcgctactgcatatatagtctccagtacc

SEQ ID NO: 4582 - DNA, 1530 bp, Homo Sapiens
ggccaaaatgaggcccctccgaacactcacagcattccaggcgaacctttatataattatgcgtccattcgtttaccagaggagcatatccctttctttctgcataacaataggcacatagcaacagtgtgtcggaaggactctctttgtccctacaaaaaacatctggagaagctcaaatactgctggggttatgagaaatcctgtaagccagagttccggtttggctaccccgtgtgcagctatgtagacatggggtggaccgacaccttggagtcagcggaagatattttttggaaacaggccgatttcgggtacgcccgcgaacggctcgaagagatgcatgtgctctgccagccaaaggaaacctccgactcttctctcgtctgcagccgctatctgcagtattgtagagccacgaatctgtatctggatctgcgcaatataaagaggaaccacgatcggtttaaggaagacttctttcagtccggggaaatcggcgggcactgcaagctggatattcggaccctgaccagcgagggccagagaaagtctccactgcagtcctggttcgccgaactgcaaagctacactcagcttaattttcgccccattgaggacgctaagtgcgacatcgtgattgagaaaccaacttacttcatgaaactggatgccggagtgaacatgtatcaccacttttgtgatttcattaacctctacatcacacagcatgtcaacaatagtttcagcacggacgtgtacattgtcatgtgggatacctctagttacggctacggtgacttgttttcagacacctggaatgctttcacagactatgatgtgattcaccttaagacgtacgacagcaagagggtgtgttttaaagaggctgttttttcattgttgccacgaatgaggtatggacttttctacaatacacccctcatttccggatgccaaaacaccgggctgtttcgggcctttgctcaacacgtcttgcatcgattgaatataacccaggagggacctaaggacggtaagataagagtcactatccttgcccggagtacagagtaccggaaaatccttaaccagaacgaactggtcaacgccctgaaaaccgtcagtaccttcgaagtccagatcgtggactataagtatcgggagctgggatttctcgaccaactccgcatcacacataatactgatattttcatcggcatgcacggggcgggcctgacccacctgctcttcctcccggattgggcggcagtgttcgaattgtataattgcgaagatgaacgctgttaccttgacctggccaggttgcgcggcgtccattatatcacttggagacgacagaataaggtttttccacaggataaaggccaccatccgaccctgggtgaacatcctaagtttactaactacagttttgatgtggaagagtttatgtacttggttttgcaggcagcagatcacgtgctgcagcaccccaagtggccctttaaaaagaagcatgatgagctt

SEQ ID NO: 4583 - DNA, 1083 bp, Homo Sapiens
aactccctgctgacagaaccacccttcagatggcggttctacctccatgaaacttggacccagggcaaccgactcagcaccgtcacattggctaccgttgattgccagcctcacggctgtcaggctcaggtgacattcaacttcacatcattcaaatctgttttacggggctggtccaatccgactatctgcttcgtttatgaccagacccactccaactgccgagactactgggtggacaccaacggtgggtgtccatatgcctattgccgtatgcacgtcacccagctgcatactgctaaaaaactgcagcacacctataggctcactagtgatggccgcaccacctatttcctgacgatccccgacccttgggactcccggtgggtaagcggagttaccgggcgcttgtataggtggcctacagactcctacccagtgggaaagctgcggatatttctcacctacatccgcgtaatccctcaggtgcttagtaatctgaaggatcaggccgacaatattaagcatcaggaggaggtcatcaacacgctcgtccaatcccatccgaaggccgatatggtgacttatgacgataaggcagaggcgggtcccttcagctggattactctggttaggcatggcgcccggctggtgaatatggctggacttgtgaacctgagtcactgttttctctgtaccgcactgagtcagcccccattggtggccgtgcctctgccccaggccttcaatacaagcggaaatcatactgctcaccccagcggggtgttctctgaacaggtgcctctgttcagggatccactccaaccacaattcccattttgttacaccacacctaatagctcttggtgcaatcagacatattccggctccttaagcaacttgagcgctccagcagggggttacttctggtgcaacttcacccttacaaaacatctgaacatttccagcaataatactttgagccggaatctgtgccttccgatttccttagtccccagactcacattgtactccgaggcagaattgtcatccctcgtcaaccctccaatgcggcaaaaaaga

SEQ ID NO: 4584 - DNA, 363 bp, Homo Sapiens
gcccccccctcctgcagggagtgttaccagagtctccattaccggggggaaatgcagcaatatttcacctatcatacccacattgaaaggtcctgctatggtaacctgattgaggaatgcgtcgagagcgggaagtcatattacaaggtaaaaaacttgggggtctgcgggtcccgcaacggggccatatgcccacgcgggaagcagtggctttgtttcaccaagattgggcagtggggagtcaacacccaggtgttagaggatatcaagcgagagcagatcatagctaaagccaaggctagtaaacccactacacctcccgagaataggcctagacactttcacagtttcatccagaagctg

SEQ ID NO: 4585 - DNA, 1062 bp, Homo Sapiens
atggtaacgcccgtcacctggatggataatcccatcgaagtctatgtcaacgatagcgtttgggttcctgggcccactgatgataggtgtcccgctaaacctgaagaagagggaatgatgattaatatatctatcggataccactatcctcccatttgcctgggcagggcccccggttgtctgatgccagcagtgcagaactggttggtcgaggtgcctaccgtgtccccaaactcccggttcacctatcacatggttagcggtatgagccttagaccaagggtgaattgtctgcaggacttctcctatcagcgaagccttaaattccgacctaagggcaaaacctgtccgaaagagattcctaaagggtccaaaaatacagaagttctggtctgggaagagtgcgtggcgaactctgtcgtaatcctgcaaaacaacgagtttggtactatcatcgactgggcaccaagaggtcagttttaccacaattgttccggacagacgcagagctgcccaagcgcacaggtcagcccagccgtcgacagcgatcttacagaaagtctcgataaacacaagcacaaaaaactccaatcattttacctctgggagtgggaagaaaaaggaatatccaccccacgtccaaaaattatttctccggtgagcgggccagagcaccctgagctctggcgcctgactgtggcatctcatcacatacgaatatggtccggcaatcaaacactggagaccagatatcgtaaacccttctatactatcgatttgaatagtattctgactgtccccctccagagctgcgtgaagccaccttatatgttagtcgtggggaacatcgtcatcaagcctgcaagtcaaactataacctgtgaaaactgcaggctgttcacctgcattgacagcacgttcaactggcaacaccgaatcctgctggtgagggccagggaaggcatgtggatcccagtttccacagaccggccctgggaggcatcccccagtatccacattctgaccgaaatccttaaaggcgtcctgaaccggagtaaacgg

SEQ ID NO: 4586 - DNA, 1062 bp, Homo Sapiens
atggtgaccccagtcacctggatggataatcctatcgaggtttacgtgaacgactccgagtgggttccgggcccaaccgacgaccgttgtcccgctaaacctgaggaggagggcatgatgataaatatttctatcggatatcggtatccacccatctgtctcggtaccgctccaggatgtctgatgcccgctgtacagaattggctggtagaagtgcccatagtaagcccaatctctcgtttcacttatcatatggtctctgggatgtctttgcgccccagagtgaactatctgcaggactttccataccagagatcactgaaatttcggcctaaaggaaagccttgtcccaaagaaattcccaaggaatcaaagaacaccgaagtgctggtttgggaggaatgcgtcgccaacagcgccgttatactgcagaacaatgagttcgggacaatcatcgactgggcaccaagggggcagttttatcacaattgcagtggccaaacacagagctgtccgtctgcccaggtctctccagccgtggatagtgatctgacagaatccttagataaacataagcacaagaaacttcagagcttttatccttgggagtggggagagaagggcatctcaaccccacgacccaaaatcatttcccccgtatccgggccagagcatcccgagctctggaggctgaccgtggctagccatcacatccgtatctggagtggaaaccagacattagagactagagacaggaaacctttttatactgtggacctcaactcctcactgacgctgccactccaatcttgtgtgaaaccgccatacatgcttgtggtgggaaatatcgtgataaagcccgacagccagactatcacgtgcgaaaattgtcgcctgctcacctgtatcgattccacctttaattggcagcatcggatcttgctcgtgcgggccagagagggagtctggatcctggtgagcatggacagaccatgggaggcaagtcccagcgtccatatcctgaccgaggttctcaagggcgtgctgaaccgatctaagcgc

SEQ ID NO: 4587 - DNA, 1062 bp, Homo Sapiens
atggtgacacccgtaacatggatggacaatcctattgaaatctatgttaacgactctgtttgggtaccagggcctattgacgacagatgccccgcaaagccggaagaagaaggaatgatgattaatatctcaattggttatcgttacccaccaatttgcttgggccgcgcaccagggtgcttgatgccggccgtccaaaattggcttgttgaggtccctaccgtgtctccaatttcccgatttacatatcacatggtctcagggatgagcctgcgcccaagggtgaattatttgcaggatttttcctatcagagatccctcaaatttaggcccaagggaaaaccctgtcccaaagagataccgaaggagtccaagaataccgaggtgcttgtctgggaagaatgcgtcgcaaatagcgcggtaattttacaaaacaacgagttcggtacaatcatcgattgggcaccaagaggccaattttaccacaattgtagcgggcagacccagtcctgtccttctgcccaggtgtcccccgccgtggacagtgacctcaccgagagtctcgataagcacaaacacaagaaactgcagagcttctatccttgggaatggggcgagaagagaatctctacacctagacctaaaatcgtctctcctgtgagcgggcccgagcatccggagttgtggcgactgactgtggcaagtcaccatatccgaatctggtcaggcaatcagaccttggagacgcgggactgcaaacctttctacactatcgacctgaactcctcccttacggtgccgttgcagtcctgtgtaaagccaccctatatgctggtggtaggtaatatcgtgataaagcctgatagtcaaaccatcacttgtgagaattgccggctgctgtcatgtatcgattcaacatttaattggcagcacaggatcctgcttgtccgggcccgggagggcgtatggataccggtgtctatggataggccttgggaagcttccccctcagtgcatatcctcaccgaagtactgaaaggcgtgcttaaccgctcaaagcgc

SEQ ID NO: 4588 - DNA, 867 bp, Homo Sapiens
atgtggaccgtgccaagctttacgaatgatagttaccaagtgtataatgtgtttagcacaaatagtttccagctccttaccgtaaaacgcacaccccacgaagcctggcgggttcccttaaccaccaaaactaacaaaacaaaaggactgcccgattgtcctaaaaagcccactaacgggccatttatcgtgacctcaatattgtgggataattgtaatgcccctaaggcagtcgtgcttcaaaccctcgccatgggcatcgtgatcgactgggctcctaagggacactactggcaggattgcagtagcaagaataccctgtgctcagagttcatatatagcctggactatattgaacatgggtggcagtcctacactatgaggcagagagttagtccatacccgttcaagtggatggataccggtatagctccacccagaccaaagatcatccacccattcttcactccagaacaccctgaattatggaagttagctgccgctctgtctggtataaaaatatggaacaccacatatcagttgctgagaaccaagactaagaccccaactttcaacatcaccctcatctccgagtgggtcattcctatacgctcttgtgtgaaaccaccctacatgttactggtcggcaatatcatcatgatgccagatgcccagactatcgaatgccacaactgtaagctctttacttgtatcgacgctaccttcaatcctactacaagcatacttctcgtacgagcacgcgaaggtgtctggatcccagtctccctccaccgaccatgggagagcagcccatccattcacattgtgaatgaggtgcttaaagatatcctgaaaaggactaagcgg

SEQ ID NO: 4589 - DNA, 900 bp, Homo Sapiens
cagtggaacgagaatagccttgtgagcttctctaagattatcgcctccgggaaccacctgagcaactgctggatttgtcataactttattacccggtcatcttcataccaatacattctggtccgcaacttctccctcaacctcacattcggtagtgggattcccgagggccagcacaaaagcgtgcctctgcaagtatcacttgccaactctgcccatcaggtgccatgcctcgatttgaccccccctttcaatcaatcaagcaaaacgagcttttacttctacaactgttccagtctgaatcaaacttgttgtccctgcccagagggtcactgcgacagaaaaaatacatcagaagagggtttcccctcaccaaccatacatccgatgagctttagcccagcagggtgtcatcctaatttgacccactggtgtccggccaaacagatgaatgattatcgagataagagcccacagaatagatgcgcggcctgggagggcaaagaactgattacctggagggtgctgtacctgttgccaaaggcccatacagtcccaacttggcctaagtccactgtaccattgggaggacctttatctcccgcctgcaaccaaacaatccccgccggttggaagagccaactgcataaatggtttgattctcacataccccgttgggcctgcactccgccgggatatgtattcctttgcggacctcagaaaaataaattgcccttcgacggctcccctaagattacatacagcactccacctgtagcaaacttatacacttgtataaataacatccagcacacgggagagtgcgccgtggggcttctcggcccgcgcggcatcggcgtaaccatttacaataccacccaaccccgacagaagcgtgca

SEQ ID NO: 4590 - DNA, 900 bp, Homo Sapiens
caatggaacgaaaactctctggttagcttttcaaagatcatcgcttcaggaaatcatctgagcaactgctggatttgccataatttcataacaagaagtagcagctatcagtatatcctggtgcggaatttttcactcaacctgacctttggaagcggaattcccgaaggtcagcacaaaagcgtgcccttacaggtttccctggcaaattctgcccaccaggtgccttgcctcgacctgacacctccgtttaatcagagttcaaaaacatctttctacttctacaattgctcctctctcaaccagacctgttgtccctgcccagagggtcattgcgatcgcaagaacacgagcgaagaggggtttccttctcccacaattcacccaatgagtttcagtccagcgggttgtcacccaaatttaacacattggtgtcctgccaagcagatgaatgactatagggataagtccccgcagaatcgatgcgcggcctgggaaggtaaggagctgataacgtggagggtgctgtactctctccctaaggcccacacagtcccaacgtggccaaaaagtacagtgccactcggtggcccactcagtcctgcctgcaaccagacaattccagcaggatggaagagtcagcttcataagtggtttgacagccacataccacgctgggcctgcacaccgcctggatacgtttttctttgtgggcctcagaaaaataagctcccattcgatgggtcaccaaagatcacgtatagtacaccgccagtcgcgaatctttatacctgcatcaacaacattcagcacacaggcgagtgtgccgttggcctgttaggaccgaggggcataggcgtgaccatatacaatacgactcagccacgtcagaagagggct

SEQ ID NO: 4591 - DNA, 309 bp, Homo Sapiens
aattacaccagactgtgggctaactcaacaagttcttgggactctgtaatccagaataagacaggtagaaatcaaaatgaaaacattaataccaatcccataaccccagaggtggactacaaaggcaactctacaaatatgccagaaacctctcatattgtggcactgactagtaagagcgagcaggagctctacatcccctcagttgtaagtaactcccccagtaccgtccagtccattgagaacacctcaaagtctcacggagagatcttcaagaaagacgtgtgtgcggagaacaacaacaacatg

SEQ ID NO: 4592 - DNA, 303 bp, Homo Sapiens
gtgccgcggttccccaggacagaggtcggagcaggacattccgtaaacgaggagaccaaggcagaaaaggtaggcaatcagactagcgttatcccagctacaagcaggcaggcagcgcttggcaccagttggactcagcgccgaacacaacccttacaggagcggagccactggcaccctcggggcaataacgccagtggaatggggggccatcgcatgtttccgggccccttacgtgggcccgcggctcaggttctggagaacgagtgtggctctctcgggagagctgcagaaggccggtct

SEQ ID NO: 4593 - DNA, 300 bp, Homo Sapiens
cccggagccaatcctacatttcagacgggatatacacctggcactccctacaaggtgtcttgttcacccaccagcggcgctgtgccaccatattcttcttctccaaacccataccaaaccgccgtgtatcctgttcggagcgcctatccccagcagagcccctacgcgcagcagggcacatattatactcaacctctttatgctgcccctcctcatgttattcatcacaccaccgttgttcagcctaacggaatgcctgcgaccgtctaccccgcccccattcctccccccagaggaaat

SEQ ID NO: 4594 - DNA, 267 bp, Homo Sapiens
acctgcgagattgtaacactggatcgcgacagttcacagccaaggcgaaccattgccaggcagacagcacgctgtgcctgccggaagggacagatcgcgggaaccacacgtgccaggccagcctgtgtcgacgccagaattattaaaacaaaacagtggtgcgacatgctgccctgtctcgagggggaggggtgtgatctcttgattaaccggtcagggtggacttgcacacagcccggaggacgaatcaagacaaccaccgtgagc

SEQ ID NO: 4595 - DNA, 219 bp, Homo Sapiens
ttatatttcaaagtcgctaaagccctcaaagccgcaaaagatcctgatgccgtcgccgttaaaaatcacaatccagacaaggtttgctgggcaaccaacagtcaggccaaggccacgacaatggagagctgtccttctctgcagtgttgtgaaggctgcaggatgcatgcctcatctgatagcctccccccatgctgctgcgacatcaatgaaggcctg

SEQ ID NO: 4596 - DNA, 591 bp, Homo Sapiens
tttcctcgcattcagcagttatttactagtccggagtcctctgtaaccgctgctccccgcgctcgcaagtataagtgtgggctcccccagccatgtccagaggaacatctggcattccgggttgtctccggagccgcaaatgtgatcggacctaagatctgcctcgaagacaagatgcttatgagcagtgtgaaggataacgtaggtagaggactcaacattgcattagtaaatggggtcagtggtgagctcatcgaggcgcgcgcttttgacatgtgggccggggacgtcaatgacctgctgaaattcattagaccattgcacgaggggacattggtgtttgtggcgtcctacgatgatcccgccacaaaaatgaacgaagagaccaggaagttgttctccgagttgggcagcagaaacgctaaagaacttgcttttcgcgactcctgggtatttgttggcgccaagggtgtgcagaataaaagtccttttgaacaacacgtgaagaattctaagcacagcaataagtatgaggggtggcccgaagccttggaaatggagggttgcatcccgaggagatccaccgcaagt

SEQ ID NO: 4597 - DNA, 864 bp, Homo Sapiens
cttcaagcggccgatacgtgtccagaagtgaagatggtgggcctggagggcagtgataaactcactatattacgtggttgcccggggctcccgggcgccccaggaccaaaaggagaagctggaaccaacggtaaaaggggggagcgcggtccccctgggccacccgggaaggccggaccccccggacccaacggggccccaggcgagcctcagccatgtttaacagggcctagaacatgtaaggacttgcttgaccgggggcactttctgtccggttggcacacaatttatctgccagactgtcggcccttgaccgtgttgtgtgacatggacactgacgggggcggctggactgtcttccagaggcgggtcgacggttccgtggacttctatcgcgactgggcaacttacaaacagggattcggatctcgactcggagaattttggttaggcaacgataacatacatgccctcacagcccagggcacatctgagctcagagttgacctggtcgactttgaggacaactatcaattcgcaaagtatcgttcattcaaagtggctgatgaagccgagaagtataacctcgtactgggggcctttgtggaggggagtgccggtgattccctcaccttccacaacaaccaaagcttctctactaaagaccaggataacgatttgaatacggggaattgtgctgtgatgttccagggagcctggtggtacaagaactgtcacgtgtcaaacctgaatgggaggtacttgagaggcacacacggttccttcgccaatgggattaattggaaaagtggtaagggttacaattactcctacaaggtgagcgaaatgaaagtacgccctgcc

SEQ ID NO: 4598 - DNA, 1101 bp, Homo Sapiens
tgtggggccatgagtccaccccagttggcactcaacccatctgcactcctgtctaggggatgcaatgattcagacgttttggccgtggctggcttcgccttgcgggacattaataaggaccgaaaggacggatatgtgctccgcctcaatcgggtgaatgacgcacaggaatacaggcgcggcgggctgggaagcctcttttatctgactctcgacgtcctggagactgactgtcacgttcttaggaaaaaggcatggcaggactgcgggatgaggattttctttgagtctgtatacggtcagtgtaaagccatcttttacatgaataatccatctagagtgctctacctggccgcatacaactgtacactccgccccgtttctaaaaaaaagatctatatgacctgtccagactgtccttccagcattcctacagactcttccaatcaccaggtcttagaagcagctactgagtctctcgccaagtataataacgaaaacacttcaaagcagtacagtttgtttaaggtaacgcgcgcctcctcccaatgggttgtggggccgtcttacttcgtggaataccttatcaaagaatcaccctgcacgaagtcccaggcctcaagttgctcactgcagagctccgattctgtccctgtggggctttgtaaagggtctttgacacgtactcattgggagaaattcgtaagcgtaacatgcgattttttcgaatcacaggcccccgccacggggagcgagaacagcgctgtcaatcagaaacctacaaatctgcctaaggttgaagagtcccaacaaaaaaacacaccccctacagacagccctagcaaggccggaccaagggggtcagtgcagtacttgcctgacttagacgacaaaaactcacaggagaagggaccacaggaagcctttcctgtgcatttggatctgacgaccaatccccagggcgaaaccctggacatcagtttcctgtttttggagcctatggaagaaaaactggtggtcctgccctttcccaaggaaaaggcaaggaccgcggaatgtcccggacccgctcaaaacgcctctcctttagttctgcccccc

SEQ ID NO: 4599 - DNA, 444 bp, Homo Sapiens
acaccttccgccagtagggggccacgttcatatcctcatctggagggtgacgtgaggtggaggagactcttttccagtacacacttctttctgcgtgtggaccccggaggcagagtccaaggcaccaggtggcgtcatgggcaggacagcatcctcgagattagatccgtccacgttggggtggtcgtaattaaagcggtctccagtggcttttacgtggcaatgaacagaagaggaagactctatggaagcagactctatacagttgactgtaggtttagagaacgtatcgaggaaaatggtcataatacatacgcatctcagagatggcgacgtcggggccagccaatgtttctggccctcgacagacgcggcggcccccgacctgggggccgtacacgtcgatatcacctgtctgctcacttcctgcctgtccttgtctct

SEQ ID NO: 4600 - DNA, 528 bp, Homo Sapiens
gcccccaccgcccctaatggcacactggaggctgaactcgagagacgatgggagtctctggtggcattgtccttggcccggctccctgtggccgcccagcccaaagaggctgccgtgcagtccggcgcaggcgattaccttcttggcattaagcgactgagaaggctgtattgcaatgttggaatcggtttccatctgcaggccctgcccgatgggaggatcggaggcgcccacgccgataccagagattctcttctggagctgtcacccgtggagcgcggtgtagtaagcatttttggcgttgcctcacgattctttgtggccatgagcagcaaagggaaactgtacggatctcctttcttcactgacgaatgtacgttcaaagagattcttctccccaataactacaatgcctatgagagctataaatatcctggcatgtttatcgcgttgagtaagaacggcaagacaaagaagggtaatcgcgtgtctccaaccatgaaagtgacccacttcctgccacgtctg

SEQ ID NO: 4601 - DNA, 633 bp, Homo Sapiens
caggaaggaccagggcgcgggcccgccctggggagggaactggcatccttgtttagagcggggcgggagccccagggagtgagccagcagcatgtccgtgaacagtccctggtcactgatcaactgtccagacgtctgattcgcacttaccagctgtactcacggacttccgggaaacatgtccaggttttggccaacaaaaggataaacgccatggccgaagacggcgacccctttgccaagctgattgtggagaccgatactttcggctctcgcgtacgagtgcggggcgccgagacgggtctctatatatgtatgaacaagaaaggcaagctgattgccaagtcaaacggaaagggtaaagattgtgtcttcaccgagatcgtgctcgaaaacaactacactgcccttcagaacgctaagtacgagggctggtatatggcttttacaaggaagggccgtcctcggaaggggtccaagacccgtcagcatcaaagggaggtgcactttatgaagcggctgcctcgtgggcaccacacaacggagcagagtctgagattcgaatttctcaactatcctccctttaccagaagtctgagagggtcacagcggacctgggccccagagccccgc

SEQ ID NO: 4602 - DNA, 216 bp, Homo Sapiens
cggagagtagctgtcaccgcccgacacctcagcagactcgtggttggcgctgctgtatggcgcggcgcaggccgcgcattccttctcatcgaggacctgaccgggagttgttttgagcccttgccacagggtcttctgcttcatgagctgcctgacaggcggtcatgtctggccgctggacatcagtggcgcggatatacagtttcctcccacaca

SEQ ID NO: 4603 - DNA, 1239 bp, Homo Sapiens
ctttggggcggtctgctgccaccaaggaccgaactgcccgcttctcgacctcctgaggatcgtctgccacggaggcccgcccgtagcggcggtccagctcccgctccccgcttcccactgcctcctcccctggcatgggatgccaggggtggcagcctcaagactttccgcgcactgcttacccttgccgcgggcgcggatggccctcctaggcagagccgaagcgaaccacggtggcatgtgagcgcccggcagccccgaccggaggaaagcgccgctgtccacggtggcgtgttttggagccgcgggctggaagagcaggtgcccccggggttttctgaagcacaagccgctgcctggctggaggcagctcgaggagccaggatggtggccctggagcgggggggttgcggtagaagcagtaaccgtctggcaagatttgccgatggcacccgcgcttgtgttaggtatggcattaaccctgaacagatccagggtgaggcactgagctactacctcgcgcgcttattgggcctgcagagacacgtcccacccttggcgctcgcacgtgttgaagcacgcggagcgcagtgggctcaagtgcaggaggagctgagagccgcgcactggactgaaggaagcgtggtcagtctcacacggtggctgccaaatctcacagacgtggtggtacccgcgccttggaggtcagaggatgggcgccttagacccctgcgggacgccggaggcgagttggcaaacttgtcccaggcagaacttgtagacttggtgcagtggacggatttgatcctgtttgactacctgaccgccaacttcgacaggcttgtttccaacctgttcagtctgcaatgggatcctcgagtgatgcagcgggcaacaagcaacctgcaccggggtccaggcggtgcgctggtgtttctcgacaacgaagccggtctggtgcacggctatagagtggccggaatgtgggataagtacaatgagccgcttctgcaatctgtgtgcgtcttcagggagagaaccgccagacgtgtgttggagctgcaccgcggtcaggacgcggctgcaaggttactgcggctgtatcgaagacacgagccacgtttccccgaacttgcggctttagcggacccccacgcccagttactccaacgtcggctggacttcctcgcaaagcacatcttgcactgcaaggccaaatacgggcgtcgttctggtacc

SEQ ID NO: 4604 - DNA, 555 bp, Homo Sapiens
ttgcctgatcccggaaattcaacatggccacccggcgctcaagcgggactccccgccgcactggccctccccctgcctcgcctgccaaggatcctgtttcctatggccggacggccagcacggcctagctccgattttgtgggctgtgcgcagggcatgtgctgtcatgggcgacaggggaccgttcatatacatacatcctccgtttcatgctggacgccctgcccagtgaccggaacaggtgggactgccgtgtcacgaaaggatcgagtgctcccacatcggaggcaggtctctttggcttgtgtgtgcgctgtcggcgaacgcgcaggccagctgtggtctcagaagccggtgcagatggcccgcccctctgcaaggcatctcctgccacggggctctagtcctaattcccaagcggtattgctgccttctgtttgcccagtgccttggcctccggtcggaccttctccaggtcagggtgagggactgtccccggcgttccccggtgttggaacagaccgcggtgacagttgggccttggtactgcaggtt

SEQ ID NO: 4605 - DNA, 711 bp, Homo Sapiens
atgggtagtggtaatcctgcccccggcggggtgtgttggcttcagcaggggcaggaagcaacatgctcactcgtcctccagacagacgtgactcgggcagaatgctgcgcgagcggcaacatcgatacggcttggtccaatctgacccaccccgggaacaaaattaatctgctgggtttcctcggtttagtgcactgccttccatgcaaagatagctgtgacggcgttgagtgcggtccagggaaagcctgccgtatgctgggcggcaggcctagatgtgaatgcgccccggattgcagtggtctgcctgcacgcctgcaggtgtgcggaagcgacggtgccacgtacagagacgagtgcgagctgcgtgccgcccggtgccgtgggcaccccgacctgtccgtaatgtataggggtaggtgtcgtaagtcttgtgagcacgttgtgtgcccccgtccgcagtcatgcgtggtggaccagacggggagtgcccattgtgtcgtatgccgggctgccccttgccctgttccaagctcaccaggacaggaactgtgtgggaacaataacgtgacatatatatcctcctgtcatatgcgtcaggctacctgctttctgggccgaagtattggagtgcgccacgccggctcctgtgctgggacacccgaagagccccctggcggagagagcgcggaggaagaggagaacttcgtg

SEQ ID NO: 4606 - DNA, 672 bp, Homo Sapiens
cagtttcacggagagaaagggatcagtattcccgatcacggattctgtcagcccattagtatccctttgtgtaccgatatcgcgtataaccagacaattatgccaaacctcttgggccacacaaatcaggaagatgccgggctggaagtacatcagttctatcccctggttaaagtgcagtgttctccagagttgcgattctttctttgttctatgtacgcccctgtatgcacagtcctggagcaggcaatacccccctgtagatcaatctgcgagcgggcaaggcaggggtgtgaggctctgatgaataagttcggattccagtggccagagcgcctgcgctgcgagcattttccccgacacggagccgagcaaatctgcgtgggacagaaccattccgaggacggagcaccggcacttctgactaccgctccgcccccaggcctgcagccaggcgctggtgggaccccaggcggccctggaggcggaggcgccccgcctcgctatgccaccctggagcacccctttcactgcccccgcgttttgaaggtgccttcatacctgagttacaagttcctgggtgaaagagactgtgccgccccatgcgaacctgcgcgccctgatgggtctatgtttttttcacaggaagagacccgattcgccagactttgg

SEQ ID NO: 4607 - DNA, 672 bp, Homo Sapiens
cagcctagcttgcaagatgaactgaaggataacactaccgtgttcactaggatcctggaccggctgcttgatggctatgacaaccgactgagacccgggctgggggagcgggtgactgaggtgaagacagatatcttcgtcacaagtttcggaccagtgtctgaccacgacatggagtacaccatagacgtgttctttcgacagagctggaaggacgagcggcttaaattcaagggcccaatgaccgtgttgagactgaacaacttaatggcaagcaaaatttggacacccgacaccttctttcacaacggaaagaagagtgtggcccataacatgacaatgcccaataagctgctgagaattacagaagatggcacactcctgtataccatgaggcttacggttagggccgaatgcccaatgcaccttgaagacttcccaatggatgcgcacgcatgccctctcaagttcggcagttacgcatacactagagccgaggtcgtgtatgaatggacaagagagcccgctagaagcgtggttgtcgcagaagacgggagtcggctgaaccaatatgaccttctgggccagaccgtagacagcgggattgttcagagctctaccggcgaatacgtggttatgaccacccacttccatctgaaaagaaaaatcggc

SEQ ID NO: 4608 - DNA, 669 bp, Homo Sapiens
aatatccaggaggatgaagcaaaaaacaatattactatctttacgaggattctggaccgccttctggacgggtacgataaccgtctccgtccggggctgggcgatagcatcactgaggtttttacgaatatttatgtcacttcttttgggcctgtgagcgacacagatatggaatacacaattgatgtgttttttagacagaagtggaaagatgagagacttaaatttaaagggccgatgaacattctccgactgaacaatctgatggcgagtaagatctggaccccagacacgttctttcacaacggaaaaaaatccgtggcgcacaacatgaccatgcctaacaagctgctgaggatccaagacgacgggacactcctgtacacaatgagactgaccgtgcaagcggagtgccctatgcaccttgaggacttccctatggacgcgcactcatgccccctgaagttcggtagttatgcctacaccacctccgaggttacttacatatggacctacaacgctagtgacagtgtccaggtagcgccagacggttctagacttaatcaatacgatcttctgggacagagtatcggaaaggaaaccattaaatcttcaactggtgaatataccgtcatgactgcccacttccatctcaaacggaagattggg

SEQ ID NO: 4609 - DNA, 693 bp, Homo Sapiens
ccccaaacagaaagtaaaaacgaggcgtcatctcgagatgtcgtgtatggtccacagccccaacctctggagaaccaactgttatccgaagaaactaagagcaccgaaacagagaccgggtccagagtgggcaaactgccagaggctagtagaatcttgaacactattctcagcaactacgaccacaagctccggccaggaatcggagaaaagccaaccgtggtcactgtggagattagtgttaattcccttggacctttatccatcctcgatatggagtataccatagatataatattttctcaaacttggtacgacgagcgactctgttataatgatacatttgagtccttggttctcaatgggaatgtggtatctcagctttggatcccggacactttctttcgcaattcaaaaagaacgcatgagcatgaaattactatgcctaaccagatggtgaggatctacaaggacgggaaggtactgtatacaatccggatgactattgacgctggatgcagcctgcatatgctgagatttcccatggactcccattcatgcccactcagttttagttccttttcctatccagagaacgaaatgatttacaaatgggagaactttaaattagagattaatgaaaagaacagctggaagctgttccaatttgactttaccggcgtgtcaaataag

SEQ ID NO: 4610 - DNA, 711 bp, Homo Sapiens
cgctctaggaaggtggaagaggacgaatatgaagactcctcaagcaatcagaaatgggtcctggctcctaaatcccaggatacagatgtgaccctcattctgaataagctccttagagaatatgataagaagcttcgaccggacatcggcataaaacctactgtaatagacgtggatatatacgtgaacagcatcggaccagtgagctctatcaatatggaataccaaattgacatcttttttgcgcagacctggacggactcccggttacgatttaactccactatgaagatcctgaccttgaactccaacatggtcggcctgatttggattccagacaccatctttagaaactcaaagaccgcagaggctcactggataacaacccccaatcagctgcttcggatctggaatgacggaaaaattctttataccctccgactgacaattaatgctgaatgccaacttcagctgcacaattttcccatggacgagcatagctgtcccttaatttttagctcttatggctaccccaaagaagagatgatataccgatggaggaagaatagcgtggaggccgctgaccaaaaatcctggcgactgtatcagttcgatttcatgggtctcaggaacacaacggaaattgtgaccacgtctgccggagactacgtcgtgatgacaatttactttgagctgagccgccgcatgggg

SEQ ID NO: 4611 - DNA, 729 bp, Homo Sapiens
gccagcaatattaagatgactcatcagcggtgcagctcaagcatgaaacaaacttgcaaacaggaaactcggatgaagaaagatgatagcactaaagcacgacctcagaaatatgaacagcttttacacatcgaggataacgatttcgcgatgcgtcctggctttggtgggtctccagtgcctgtaggaatcgacgtccacgtggaaagcattgattccatatctgaaaccaatatggacttcaccatgacgttttacctgaggcattactggaaggacgaacgcctgtcatttccatcaactgctaataagagcatgacgttcgaccaccgtttgaccagaaaaatttgggtaccagatatattttttgtccactcaaaacggtccttcatccacgatacgactatggagaacatcatgctgagagtgcaccctgacggaaacgtgctgctctcattgcgaatcaccgtcagtgcaatgtgtttcatggacttctctcgctttcccctcgatacacaaaactgctccctcgagttggagtcttatgcatacaatgaagacgatctgatgctgtattggaaacacggcaacaaaagcctgaataccgaggagcatatgtcactgagccaattcttcatcgaggatttcagcgcgtcttccggcctggcattttacagtagcactggttggtacaacaggctctttatcaatttcgttttgagacgacat

SEQ ID NO: 4612 - DNA, 837 bp, Homo Sapiens
ctggcccatgggagaagactgatctgctggcaggcgttgttacaatgtcaaggtgagccggagtgttcttacgcctacaatcagtacgccgaagcctgcgcgcccgtgctggcccaacatggcggcggagacgctcctggcgctgctgccgctgccttccccgcctcagccgcttcattctcttctaggtggagatgtcctagccactgcatctctgccctgatacaactcaatcacacccgtcggggacctgctctcgaggattgcgattgcgcgcaggacgaaaactgtaagagtactaaacgagctatagaaccgtgcttgcctcgtacatctggggggggcgcgggcgggcccggcgccggtggtgtcatgggatgcacagaagctcggcggcgatgtgacagggattcccggtgcaatttagctctgtctagatatttaacgtattgtggtaaggtgttcaatggtctgcgatgtaccgatgaatgtcggaccgtgatcgaagacatgctcgcaatgcccaaggcagccttgctgaacgactgtgtttgcgacggcctcgaacggcccatctgtgagtctgtgaaggagaatatggcccgactgtgcttcggggctgagctgggcaacgggcctggcagctccgggagtgatggcggtctggacgactattacgacgaggattacgatgacgaacagaggaccggaggggcaggcggagagcagcctctggatgacgatgatggtgttcctcaccccccgcgcccagggtccggggcagccgcttctggaggtcgtggcgacctgccttacggacccgggagaagaagctcc

SEQ ID NO: 4613 - DNA, 951 bp, Homo Sapiens
cgcgatataacattgagcgggcacccaaggctgtcaactcagcacgttgtgctgcttcgcgaggacgaggtcggtgatcctggtactaaggacctgggacatcctcagcatgggtcaccaatccaagagactcagagcgaggtggttacactcgtgtcacctcttccaggctccgacatggccgcgctgcccgcctggcgggctacctcaggcctgacgctgtggccccacacagccgagggccgcgacctgctgggcgcagaaaaccgggctctgaccggcggccagcaggccgaagaccccactctggccagcggagcccaccaatggccaggttctgtcgaaaaactgcagggaagcgtatggtgtgatgcggagacactcctctcctcatcccgcaccgggggccaggctccgccatggttaacagatcacgatgttcagatgctgcgactcctggcccagggagaggttgtagataaagccagagttccggcgcatgggcaagtactgcaggtggggttctccactgaagccgccctgcaagacctgagctcccctcgattgtctcagttgtgttcacagggtttgtgtgggctcataaagagacctggtgatctgcccgaagtgctgtctttccacgtcgacagggtgctcggcctccggcgttccctcccagctgtcgcgcgtcgatttcattcccctttactcccttatcggtatactgacggaggggcacggcccgtgatctggtgggcccctgatgtacagcatttgagtgatcccgacgaggaccaaaattccctcgcgttgggctggctgcagtaccaggcattactcgcccacagttgcaactggcctggccaggcgccttgcccaggaatccaccatacggaatgggcaagactggcccttttcgactttctcttgcaggtccatgacaggctcgac

SEQ ID NO: 4614 - DNA, 357 bp, Homo Sapiens
gatgcagaaccggtgctcggaggaggcccaggaggagcatgccgcgcccgaagactgtatgtcagttttcgcgaagtgggctggcacaggtgggtaatcgccccccgaggattcctggccaattattgtcaagggcagtgcgccctcccagtcgcccttagcgggagcggggggcctcccgctttgaatcacgctgtactccgggccttaatgcacgccgccgccccaggcgcagcggacctcccttgctgcgtccctgccaggttgtcccctatctcagtgttgttcttcgacaatagtgataatgtggtgctgcgtcagtacgaagacatggtggtggacgaatgtgggtgtcgc

SEQ ID NO: 4615 - DNA, 387 bp, Homo Sapiens
acggccctcgcaggcactcggactgcacaaggatcaggcggcggagccggacgcggccatgggaggagaggtaggagccgctgcagtagaaagccgttacacgtggatttcaaggaattaggatgggacgattggattatcgccccgcttgattatgaggcataccactgtgaaggtctgtgtgatttccccttgcgctcccacctggagccgaccaatcacgccatcattcagactcttctgaactccatggcacccgatgcagctcctgcgtcctgctgcgtccctgctagacttagccccataagtattctttatatcgatgccgcaaacaatgtggtctataaacagtatgaggacatggtggtggaggcttgtggatgtcga

SEQ ID NO: 4616 - DNA, 294 bp, Homo Sapiens
cttccattcgtacccataagggaacaatttttcgagatcccaatgccctctattatcctgaagctgaaggagccccataccatgagcaggtctcagaagttccttatctggctgagtgacctcttactgatgcgcaaggccttgtttgatcacttgactgcacggggaatacaggtgtacatctgggtgctcaacgaggaacaggagtataaacgggcctttgacttaggagcgacgggagttatgactgactaccccaccaaactccgggacttcctccataacttcagcgct

SEQ ID NO: 4617 - DNA, 525 bp, Homo Sapiens
aggaggccacatcttttgcacactcctcgagcccccactttcaggattagactcggtgcccaccgggggggcagtggggagctgttggaaaacacaatggaagctatggaaaatagcatggcccagagaagcgacctcctcgaactcgactgccagttgacccgggacagagttgtcgtcgttagccacgatgaaaacctgtgccgccagtcaggcttaaatagagatgtgggctcacttgacttcgaggacctgcctctgtacaaggagaagcttgaagtgtatttttctcccggacacttcgcccatggttccgaccggcgcatggtaaggctggaggacctgtttcagcggtttccacgcacccccatgtctgtcgaaattaaggggaagaacgaggagctcattagagagatcgccggtttggtccgacggtatgaccggaacgaaattaccatatgggccagcgaaaaaagctcagtcatgaagaagtgcaaagcggcaaatcccgaaatgccacttagc

SEQ ID NO: 4618 - DNA, 1080 bp, Homo Sapiens
gagggcttcacagtggaggccctttggggcaaaaccgaggaggaggcaaagcagctcgctgaggaaatgaacatcgctttctacacatcccggaccgacgacatcctcctgcaccaggatgtagaccttgtgtgtataagtatcccgccacctctgactcggcagatttctgtaaaagccctgggaattggtaagaacgtagtgtgcgagaaggcggcaacaagtgtggatgccttcaggatggtgacagccagtaggtattatccccagctgatgtcattagtcgggaatgtcctgcggtttctgccagctttcgtgagaatgaaacagttgatttctgagcattacgttggagccgtgatgatctgcgatgccaggatttatagtggtagtctgctctcacctagctatggctggatctgcgatgagttgatgggggggggaggactccacaccatgggaacttatatcgtagacctgctcactcaccttaccgggcgtagggccgaaaaagtccatgggctcttgaagaccttcgtgcgtcagaacgccgctattaggggaattcgtcacgttactagcgacgatttctgttttttccagatgttgatgggcggcggagtgtgtagcacggtgactctgaatttcaacatgccaggagcctttgtgcacgaggtcatggtggtcgggtccgctgggcgtctcgtggcacgcggcgctgacttgtatgggcaaaaaaacagtgccacacaagaggagctcctgctgcgggactctcttgctgtgggggcaggtcttccagaacagggcccccaggatgtgcctctgctctatctcaaggggatggtgtacatggtgcaagctttgcgccagagttttcaaggccagggcgacaggagaacgtgggacaggacaccagtcagtatggctgcctccttcgaggatggcctgtacatgcaatctgtagtggacgcaataaagaggtcctcccgttcaggtgaatgggaggcggtggaagtgctcactgaagaacctgatacgaatcaaaatctctgtgaggccctccaacggaacaatctg

SEQ ID NO: 4619 - DNA, 999 bp, Homo Sapiens
tctcagacaaacaactgcacctaccttagggaacagtgcttgcgcgatgccaacgggtgcaagcatgcctggagagttatggaggatgcctgtaatgacagcgatccaggtgatccttgtaagatgagaaactcctcctactgcaatttatctattcaatatttggtggaatctaacttccagttcaaagagtgcctttgtactgacgacttttactgtaccgtcaataagctgctggggaagaaatgcatcaacaagtccgacaatgtaaaggaagacaagttcaaatggaaccttacgactcgctctcaccatggtttcaagggtatgtggagctgcctggaggtagccgaggcatgcgtgggagacgtagtgtgtaatgctcagttagccagttatttgaaggcatgctctgccaatgggaatccatgcgacttgaaacaatgtcaggctgccatcaggttcttttatcagaatataccttttaacattgcccagatgctcgccttttgcgactgtgcacaaagtgacatcccctgtcaacagtccaaagaagccttgcattcaaaaacctgcgccgtcaacatggtccctccccccacatgcctctctgtgattcgatcatgtcagaatgatgaactgtgtcgcaggcattatcgcacctttcaatctaaatgttggcagcgcgtgacaagaaagtgtcacgaagacgaaaactgtataagtacacttagtaaacaagacctgacctgctcaggaagcgatgactgtaaagccgcttatatcgacattcttggcactgtgttgcaggtgcaatgcacatgtaggactatcacgcagagtgaggagtcattatgcaaaattttccagcacatgctgcaccggaaatcttgcttcaattaccccaccttgtcaaacgtgaagggaatggccctctataccaggaagcatgcgaacaaaattacactgacagggtttcactctccctttaacggagaa

SEQ ID NO: 4620 - DNA, 1626 bp, Homo Sapiens
ccgagcgcatctaaggagccagataatcacgtttacactagagccgccgtcgctgcagacgcaaaacagtgtcttgagattggccgggatacccttcgcgatggcggcagtgcagtggacgctgctatcgccgcccttctgtgcgtcggcctcatgaacgcccactcaatgggcatcggcgtgggcctgtttttgacaatatacaactccactacccggaaggccgaagttataaatgccagggaggtggctccaagattggcatttgcctctatgttcaacagttctgaacagagtcagaagggcggcctgagcgtggcagtgcccggcgagattagagggtacgagttagctcaccagcgccacgggcggttgccatgggcaagattgttccaaccgagcatccagttggccaggcagggctttccggttggtaagggccttgcagccgtcttagagaataaacggactgtgatcgagcagcagcctgtgttgtgcgaagtgttttgtcgtgatcggaaggtgctgagagagggagagcggttaacccttcctcgcctcgcagacacatacgagatgctggctattgaaggggcccaagcattctataatggatctctgatggcacagattgttaaagatatccaggctgctggcggcatagtcactgccgaagatctgaacaattattgcgctgagctcatagagcaccctctcaacatcagcctgggagacgcggtcctgtatatgcccagcgcccgcttatctggacccgtactggcattaatcctgaacatccttaaggggtacaacttctcccgcgagagcgtcgaaacccccgaacaaaaggggttgacctaccaccggatcgtagaagcgtttaggttcgcatacgcgaaacgaacactgctgggtgatcccaagtttgtcgacgtgaccgaggtagtacggaacatgacttccgagttttttgctgcacagttgcgttcccaaatcagcgaccataccacccacccaattagttattacaagcccgaattctatactccagacgacggaggcacagcgcatctctccgtggtagccgaggatggctcagcagtgagcgctacttccacaatcaatctctactttggtagcaaggtgtgctctcctgtctctggaattttatttaataacatggacgactttagttccccctcaattactaacgaattcggagccccaccctcacccgccaactttatccagcccggtaagcagcctctgcttagcatgtgtccaactattatggtcggccaggatggccaagtcaggatggtcgtcggagctgccggcggaacccaaatcaccactgatacagccctggcaatcatatacaatttatggtttgggtacgatgtgaaaagggcagtagaggaacccagactgcataacaaactgctgccaaacgtgaccaccgtggaaaggaacatcgaccaggctgtaacagccgctctggagacgcgccaccatcatacgcaaatcgcctcaacgttcattgctgtggttcaggcaatagtaaggaccgccggtggatgggcagccgccagcgactcccggaaaggaggcgaacctgccgggtac

SEQ ID NO: 4621 - DNA, 1539 bp, Homo Sapiens
ctgctcagacagcagcgatcccaagacgcaaggctctcctggcttgccggcctgcagcacagagttgcttggggcgccctcgtttgggctgctacctggcagagaagacgccttgagcagtcaacattgcatgtccaccagagccaacagcaagctctgaggtggtgcctgcagggagcacaaagaccacactgttcactgcgacgtagtaccgacatcagcacgttccggaatcatctgcctttaaccaaggcaagccaaacacagcaggaagacagcggcgagcagccacttccacctacttctaaccaggatttaggggaggcttccctgcaggccacacttctggggttagccgcgttgaataaggcctaccccgaggtgctggctcaggggcggactgcgcgggtgacacttacaagtccttggcctcgaccgctgccctggccaggaaacaccttaggacaagtgggcactccgggcaccaaggatcctcgggccctgctcctcgacgcactcaggtccccaggactgcgggcgctggaagctggcactgccgtcgagctgctcgacgtattcctgggacttgagactgacggggaggaattggccggagctatcgcggcagggaatcccggcgccccgctcagagagagagccgccgagctccgcgaagctttagaacagggaccaaggggactggcactcaggctttggccgaagctgcaggtggtggtaacactggacgcaggcggccaggccgaagcagtggctgccctgggggccctgtggtgtcagggcctggccttcttctcccccgcctatgcagcctccggcggcgtgctcgggctcaacctgcaacctgagcagccacacggcctgtatcttttacccccgggggcaccgtttattgaactgctcccggtcaaggagggtacccaggaggaggccgcttctactcttctgctggccgaggctcagcaaggaaaagagtacgaacttgtattaaccgacagagcgagcctgacaagatgtaggttaggagacgtggtgagggtagttggtgcgtacaatcagtgtccggtcgtacggtttatttgccgtttggaccagaccttgtcagtgagaggcgaggacatcggggaggacctcttcagcgaggccttaggtagagccgtcggacagtgggccggggccaagctgctcgaccacggctgcgtagaatcctcaatattggactcctcagcgggcagtgccccccactacgaggtatttgtggccctccgggggctgaggaacctgagtgaggagaacagggacaagctggaccattgtttacaggaggcctcaccccgctacaagtccctgcgtttttggggatccgtgggtccagcaagagtgcacctcgtgggacaaggagcgttcagggctcttagggccgcgctcgcggcttgccccagtagtccgttcccgccggctatgcctcgggtcttgcgtcaccggcacctcgcccagtgcctgcaggaaagagtggtttcc

SEQ ID NO: 4622 - DNA, 483 bp, Homo Sapiens
atgatgaacattcgcttcaatcacccgctgtacggtagcttcgggacccagattatacacatcggcgcctttcagggaatggtatctatcagggacaacaacattttctcagaatgggatggtattttggactataagaatgcactgctcgttgcaaaagtttttaacaagatggcttgcgtcctggcgagaatggataaggccgtgtttccgtctttagacgacatatctaaggccctcgataagcaggccttcaaatactacccctctactcggggcttgacgtatacagtcctgccctcctgggtgaaaaacctggcacagtacggaaagccaatcaaaaatatgtgccgggacgaccctacatatttcgcgcagcaacagaaggagggaacagcactcgcaattgattccaacagctgctttgaaattcagctcctgtcttttatgggcttatttatttgcggagaaactccggggctg

SEQ ID NO: 4623 - DNA, 1536 bp, Homo Sapiens
cagtggcgaggactcagctccgcgcttagggccctggaagcacagcgaggtagagaacagcgggaagattcagctctgcgctccttcctggccgagttgtctagagccccacggggggctagtgctcccccccaggatcccgcctcaagtgcccggaataagcgcagccattccggcgaacctgctcctcacattcgggccgaaagccacgacatgctgatgatgatgacatactccatggtccccataagggtgatggtggatctttgcaatagcacaaaagggatctgtctgaccggaccttccggacctcccggacctccaggcgccggagggctcccaggtcacaacggcctcgacggacagccggggcctcaaggacctaagggggaaaagggagcgaacggaaaaaggggcaaaatgggcatccctggcgccgccggaaaccccggcgaaagaggcgaaaagggagaccacggtgaactgggcctgcaagggaatgagggccccccaggccagaaaggggaaaaaggcgataagggagacgtgtctaatgatgtactgctggcaggagcaaagggagaccagggacctccagggcctcccgggccacccggacccccgggtcccccaggcccacccggaagtcggcgcgcgaaaggccccaggcaacccagcatgttcaatggacagtgcccaggagaaacttgcgctatccccaatgatgacaccctggtgggcaaagcagacgaaaaggctagtgagcatcacagtccgcaggccgaatccatgatcacatctatcggaaaccccgtccaggtgctcaaagtcacagagactttcggaacctggatacgcgaatcagcaaacaaatccgatgatcggatctgggtcaccgaacacttcagcggcataatggtcaaggaatttaaggatcaaccctccctgctcaatggaagttacactttcatacaccttccctactacttccacggttgtggtcatgtagtgtacaacaacagtttatactaccataaaggcggcagcaatactctggtgagatttgaatttggccaagaaacctcccagacattgaagctggagaatgccctctactttgaccgcaagtatcttttcgcgaatagcaaaacctatttcaacttggctgtggacgaaaagggtctctggatcatttacgccagttccgttgatgggtccagcatcctggttgctcagctggacgagaggacctttagcgttgtgcagcacgttaatacaacctaccctaagagcaaagctggcaatgcctttatagccaggggtattctgtatgtcacagatactaaggacatgcgtgtcactttcgccttcgatttgcttggagggaagcagatcaacgccaacttcgacctgaggaccagccaatccgtgctcgcgatgctggcttacaatatgcgtgaccagcatctgtacagctgggaagatggccaccttatgctgtatccggtccagttcttgtccactacactgaatcag

SEQ ID NO: 4624 - DNA, 687 bp, Homo Sapiens
aaagaagaggtcaaatcaggaacaaaagggtcacagcctatgagcccctccgatttcctcgacaagctcatgggaaggacctctggatacgatgctcgcataagaccaaacttcaaagggcctcctgttaatgtaacctgcaatattttcatcaatagtttcagctctataacaaagaccaccatggattatagggtgaacgtcttcctgagacagcagtggaacgaccctcgattgagttacagggaatatcccgatgatagtctggatctggatccaagtatgctggatagcatttggaaacccgacctgttctttgcgaacgagaaaggggctaacttccatgaagtcaccaccgacaacaagctgttgcggatctttaaaaatgggaacgtgctgtacagtattcggttaacactgatcctgagctgcctgatggacttaaaaaacttcccaatggacattcagacctgtacaatgcaattagagtctttcggatatacaatgaaagatctggtgttcgaatggctggaggacgctcctgctgtgcaagtcgcagagggactgacgctgcctcaatttatcttacgtgacgagaaggacctggggtgctgtaccaaacattataatactggcaaattcacgtgcattgaggtaaagtttcacctggaaaggcagatgggctat

SEQ ID NO: 4625 - DNA, 990 bp, Homo Sapiens
gtgactgcccagcgcgtgcgggcacatctcgaggcagccgggcatgtctgtgttctgaaagatgctttcgactttgagtctcggtctgaaatcgcaaacttgatcttggcagagaattgcgaagccgccctggctctgcatctctacagaggggggcggcttctgcaggggcatcgcattccgtttggagtgattttcggggggacagacgtgaacgaagatgcgaatcaggctgagaagaataccgtcatggggagagtgctcgaagaggcccgctttgccgtagcattcaccgagagcatgaaggagatggctcaggctcaatggcctcacgctaaaggtaaggtttacgtccaaagtcaaggcattgcaaccaccccaaacgccgcttttaactggaatacattcctccagcgaagcgagattaaccagtcagccgataacctgcacatcttccttctgatatgcggacttcggcaggtgaaggatcctttgtatctggtggatgccttctccgcgtggcaccaagaggaacctaatgtacaccttgtgattgtaggtccggaggtggatcccgtgtttactagagaagtcaaggccaaagtgaaacgcgccgcaggggttcgcctcatcggagagatgccacaggaagatctccatgcggtcgtgaagaactgctttgccgtggtcaacagcagcgtctccgaaggcatgtctgctgctatactggaggcaatggatctcgaggttccagtgctggctcgcaacattccaggcaacgcggcggttgtgaagcacgaggtgaccggcctcttgttcagcaacccccaggagtttgtgcacctcgctaagcgcctggtatctgatccagcattagagaaagaaatcgtggtcaatggccgggagtacgtgaggatgtatcatagttggcaggtcgagcgcgatacctaccaacagctgatcaggaagctggaaggatctactgaggac

SEQ ID NO: 4626 - DNA, 318 bp, Homo Sapiens
gcttcatctggcaacttgaggactttcgtggggtgcgcagtgagagaatttacttttctcgctaaaaagcccggatgcaggggtctgcgcatcacaaccgacgcctgctggggacggtgcgaaacatgggaaaagccgatcttggaaccaccatacattgaggcacaccatcgtgtgtgcacttataacgagacaaaacaagtgacggtcaagctcccgaattgcgcacccggtgtagacccattttatacgtatcccgttgcaatacgttgtgactgcggtgcctgtagcaccgctaccaccgaatgcgaaactatc

SEQ ID NO: 4627 - DNA, 690 bp, Homo Sapiens
cgcatccaccaattagctctgactggggaaaagcgagccgatatccaactgaactcctttgggttttacacgaatggctcactcgaagtagaactttccgtactccggctggggctgagggaagccgaggagaaaagcttgctcgtaggtttttccctgagcagagtgcgcagcggtcgcgtcaggagctattccactagggactttcaggattgcccactgcaaaagaattcatcatccttcctggtgctgttcctgattaacacaaaggacctgcaagttcaagtacgcaaatacggcgagcaaaaaactctctttatattccccggcctgctgcccgaagctccttcaaaaccagggttaccaaaacctcaggcaaccgtgccacgcaaagtggacggaggagggactagcgccgctagcaagccaaaatccacccccgcagtcatccaggggccttccgggaaagacaaagacctggtcctggggctgagtcatttgaacaatagttacaatttttcattccatgtagtgataggttctcaggctgaagagggtcaatacagcttaaactttcacaattgcaacaacagcgtccccggcaaggagcacccctttgacattacagtgatgattagagaaaagaaccccgacggttttctgagtgcggcggagatgccactgttcaaa

SEQ ID NO: 4628 - DNA, 309 bp, Homo Sapiens
actcattggtgccagggtactcaacgagtgcccaagcccgggtgcggacagggcgggagggctaactgcccgaatagtggagccaacgctactgccaacggcacagctgcccctgcagccgcggccgctgccgccaccgcgagcggcaatggtccccctggtggcgctttatactcatgggaaaccggcgatgatcggtttctcttcagaaattttcacaccggaatctggtactcttgcgaggaggagctgtccggcctgggggagaaatgccgtagtttcatcgacttagcccctgcatcagagaag

SEQ ID NO: 4629 - DNA, 273 bp, Homo Sapiens
cattggtgtgaggggacccggcgcgtagtcaagcctctctgccaggatcagccagggggccaacactgtatccacttcaaaagggataattcttccaatggccgcatggacaacaactcccaggccgtattatacatctgggaattgggcgacgacaagttcatacagcgagggtttcatgtcggtctgtggcaatcctgtgaggaaagtctcaacggcgaggatgaaaagtgccggtccttccggtctgtggttccagccgaggagcaggga

SEQ ID NO: 4630 - DNA, 504 bp, Homo Sapiens
tccggacctagaagacagtggcacccccttgccagttgcagttcctggtccaggccacagtctcaggggtctacacccggtgtgttatgcaaaactggtatgggtcgggaacctatccccgagactcagtgtcacttcgccaatagtatgtgtagcctccatgtgtccgttccttacttcggaaattcccctaacatcagtaacttttttaggtggtccctggcgttatcaccacgacagtggtgcgatctgggtagcttgcagcctcccagtccaaggttcaagggcttcagctgcctgtctctgccatcttcatgggattatcggcgtgctcctagtccagccaatttctgtatcctggtggaaatgggattccaccacgtgggtcaggctgaccttgaactgcttacgagtgccgatttgcccacaagcgcctctcagtccgccggcataacaggcgtcagtcatcacgcatggccgcagaccttgtcccttctgctgtac

SEQ ID NO: 4631 - DNA, 1200 bp, Homo Sapiens
gcagctggcttgcagggcaggccagcccggcgatgctatgctgtcggcccagctcaatccccccctaccttcggctttcttcttgacattgatggcgtgctcgtgagggggcatcgcgtcatccccgccgctttgaaggccttccgccgcttagtaaacagccaggggcagctccgggtccccgtagtgttcgtcaccaatgccggaaatattctccagcacagcaaggcgcaggaattatccgctcttctcggctgcgaggtcgacgcagaccaggtgatcttgagccactcacctatgaagctcttcagcgagtatcacgagaagagaatgcttgttagcggacagggccccgtcatggagaatgcccagggtctcggctttcgaaacgtggtgacggtagacgagctgcgaatggcctttcccctgttagacatggtggacttggagaggcgtcttaagacgaccccgttgccccgaaacgactttccacggattgaaggcgtgctcctgttaggagagcccgttaggtgggaaacttctttgcagttgataatggacgtccttctttcaaacgggtcccccggcgctgggctcgcgacaccaccatatccccacctgccagttctggcgtcaaacatggacctgctctggatggcggaagctaagatgcctcgcttcggtcatggtacctttctgttgtgcctcgaaacaatataccagaaggtgactggcaaggagttacgatatgagggactgatggggaaaccatcaattttaacctaccagtatgctgaggatcttatccgaaggcaggcagagagacgtggatgggccgccccgatccgcaagctgtacgcagtgggtgataaccctatgagcgatgtgtacggcgccaatctctttcatcagtatctgcagaaggcgacccacgatggggctcctgagctgggggccggaggcacaagacagcagcagcccagtgcaagccaatcctgtatcagtatactcgtttgtacaggggtgtataatccgcgaaatccccagtcaacggagccagtgttaggcggtggggaacccccatttcatggacacagagacctgtgcttttcccctggccttatggaggcctctcacgtggtaaatgacgtcaacgaggcagtgcagctcgtgtttcgcaaggagggctgggctctcgag

SEQ ID NO: 4632 - DNA, 1506 bp, Homo Sapiens
ataaagggcgaggctaagaaagagaaaggcatgacctttcttcctacgaccgtgtcagggctgagggaggaggagcgcaaggagaagggggtcgccttcctggccacaaccgagcttccggcccgatctatcgacctctccgccctcaatctgacagagctggttaatggcatgctgtctcgcgcactcaaggacagtaagaagttttttagcctcctgtctgtgacctcctacagctcattcgcatttcataaatttagcgttgccgtgtataacatcagtaacttgaaaactgttgacccagccaagtttcctacacggtattgctattgcttgaacaaccggacgaacgatctgagtgacttcaccgccctgctggtggacatcatcgggaatagtacctcttacttgactgagatctttaagagcactagcatactgagtgtgaatcaatccaacgagagcgattgtatctttatttgcgtgatgacagggaagtctggaagaaacctgtccgacttttgggagattgaagaaaaataccctattatcaattatactttcactagcggcctgtcaggagttctcggcgcagcgacacgtggtactgcccgaacctctaagccaaccaccaaatcccagaagaccttgccttccactagtcccggtcattggacacagtccacgccatgggcttccgccctgcggtctagcccctggacagagactgccgcaccatccgaaaccgaagagactctgaataccggacgcccacctgagctccctgccagagcaaccgccacatggttcagtgcctcccacacactcccagctctggctacccgacgagtcgctaggacccagtggctcacagctgatcgtcagacctgggcaagtatctctagtgttccatgggcacagaccataagcgagaagaagccgggcggatccctgtgggagacccggtctagcccgccgacaacggccggtactgaagaggctatgaacacaaccagccttttggctcctgccgccgaaattatggcaaccccgggcagtccgagccaggcatctcccacccttggagcctttacgcacggcacgcagactccttcccccacaaaagcaactgccccccggtatccccagacaggcgatctttctgctgaatggcccttcaccgccggcgaggagccagtgttggtgccgcggcctcatcaggtgtctcggtgccctcagccgctctttaaggtcggggctatggctgcggcgcccctcacattggcaatccagagactgaatccatgtttgatggaattatgccagtttttccagcagtgtctgtgcatgtcacagcggagccccaggacagaagatatgcgctactgcctggaatactacagttggtttcttaagaacgcaacctatatatgtcaacgagttaagcgggtatcacatagtcatactttaaagcagaagtgcctggaaaacatctgtaaatctgtc

SEQ ID NO: 4633 - DNA, 357 bp, Homo Sapiens
cagatgagtcaggcactttgcttcagtaagataggtggcgaggacggcgacatccacagaggctttcaatctttgctggtggcgattaaccggacggacactgagtacgttctgaggacagccaacggcctgttcggtgaaaaatcctatgacttcctgacagggtttactgattcttgcggcaagttttaccaggccacaattaagcaactggacttcgtgaacgacaccgaaaagtcaacgaccagagtgaactcttgggtagctgacaaaactaaaggcgagaatatcttactgttctacttcgataatattttgaactctttcatcgtttcatctttacagaactgccagatt

SEQ ID NO: 4634 - DNA, 1059 bp, Homo Sapiens
atggaaaaaactttagagacagttcctctcgagcgaaaaaaacgagagaaggagcagttccgcaagctgtttattgggggactttcttttgaaacaaccgaggagagcctgagaaactattacgaacagtggggtaagctgacagattgcgtggtgatgcgcgaccccgcgtccaaacgcagtcggggcttcggctttgtgaccttttcctcaatggctgaggtggacgctgccatggcagcaagacctcattccatcgatggccgtgtcgtcgagcccaagcgcgccgtggcgcgggaagagagcggtaagcctggagcacatgtaaccgtgaaaaaactgttcgtcggcggaatcaaggaagacaccgaggagcaccacttaagagactactttgaagagtatggaaagatcgataccatcgagatcattactgataggcagagtggcaaaaaacgtggtttcggttttgtcacttttgacgaccatgaccctgtggataaaattgtactgcaaaagtatcataccattaacggccacaacgccgaggtgcggaaagctttgtctaggcaggaaatgcaggaggtgcaaagttctagatctggaagaggcggaaatttcggttttggcgactctagaggtggcggcggcaacttcggcccaggacctggaagcaacttcagaggcggttcagatggatatggcagtggccgaggatttggtgatggttacaacggatatggcggcggccccggcggcgggaacttcgggggtagccccgggtatggtggcggcaggggtgggtacggaggcgggggaccagggtacggaaaccagggtggaggctatggaggtggatatgacaactatggaggagggaattatggctcaggtaactataacgattttggcaattacaaccaacaaccatccaactacggcccaatgaagagcggcaattttgggggaagcagaaacatgggaggcccgtacggaggcgggaactatggcccaggtggaagcggcggctccggtggctacggcggtagaagtcggtac

SEQ ID NO: 4635 - DNA, 1164 bp, Homo Sapiens
gtcgattctggcaacgatgtcacagatatcgcagacgacggctgtccaaagcctccagaaattgcccacggttacgtggagcattctgtgcggtaccagtgtaagaattattacaagctccgcaccgaaggtgatggcgtttacacactgaatgataaaaagcagtggattaacaaggcggtgggagataagctgcctgagtgcgaggccgacgacggatgtcccaagcctccggagatcgcacatgggtatgtggagcactctgttcggtaccagtgtaagaactattataagcttaggacagaaggagacggtgtctataccctcaataacgagaaacagtggatcaacaaggcggtaggtgataaattgccggagtgtgaggcggtgtgcggtaaaccgaaaaatcccgcgaaccctgttcagcgaatcttagggggacacttagacgccaagggctcatttccgtggcaggctaagatggtgtcacatcataacctgaccaccggagctaccctcataaatgaacagtggctgctcaccactgctaagaacctgtttctgaaccatagcgagaacgcaacagcaaaggatattgcgcccactctcaccctgtacgtggggaaaaagcaactcgtagagattgagaaagtcgttctccaccccaactatagccaggtggatatcggcctcattaaacttaagcagaaggtgtccgtgaatgagcgggtcatgcctatatgtttgccaagtaaggattatgccgaagtcggtagagttggctatgtgagtggatggggtcgcaacgcaaatttcaaattcacagatcacctcaaatacgtgatgcttcctgtggctgaccaggaccagtgtattcgtcattatgagggtagtactgttccagagaagaaaacacctaagtctcccgtcggggtccaaccgatcctcaacgaacacacattctgtgccggcatgagcaagtaccaagaagacacttgttacggcgacgctgggagtgcctttgccgttcacgatctggaagaggatacttggtatgctacaggcatcctgagttttgacaagtcatgtgccgtggccgaatatggggtgtatgtgaaggtaacgtctatccaggattgggtgcagaagactatcgctgagaat

SEQ ID NO: 4636 - DNA, 1044 bp, Homo Sapiens
atgagcgacctgggggctgtaatcagtctgctgctgtggggacgccaactgttcgccctgtactcaggcaacgatgttaccgacatctcagacgaccgcttcccaaagcctcctgaaatcgctaacggctacgtggagcatcttttccgttatcagtgcaagaattattaccgccttcggacagagggcgacggtgtctataccctgaacgacaagaagcaatggataaacaaggccgtgggcgataagctgccagaatgtgaagcagtgtgcgggaaacctaagaaccccgcgaatcctgtccagcggatcctgggtggacacctggatgccaagggctccttcccttggcaggccaagatggtgtcccaccacaacttgacgaccggcgcgacactgatcaacgagcaatggttgctcactaccgcaaagaacctgttccttaaccacagcgaaaacgcgaccgcaaaggatatcgcccccactctgaccctgtacgtgggcaagaaacaactcgtggaaattgaaaaggtcgttttacatcccaattatcaccaggtggatatcgggctgatcaaactcaaacagaaggtacttgtgaacgagagagtaatgcccatttgtctgcccagcaagaattatgctgaggtggggagagtgggatacgtgtccggctgggggcagagcgacaacttcaaactgacagaccatctcaagtatgttatgctccctgtcgcagatcagtatgactgtattacccattacgagggatcaacatgccctaagtggaaggctccaaaatcccccgtgggtgtacagccaatacttaacgagcacacattttgtgtgggaatgagcaagtaccaggaggacacttgttacggagatgcaggttccgctttcgctgttcatgaccttgaggaagacacctggtacgccgccgggatcctgagttttgataagagttgtgctgtggccgaatacggggtgtatgtgaaagtgactagcatacaacattgggtccagaagaccatagcagaaaat

SEQ ID NO: 4637 - DNA, 1317 bp, Homo Sapiens
actccactgcctccgacaagcgcccatggtaacgtcgcagagggggaaacaaaaccagatccagatgtcaccgaacggtgcagcgacggatggtctttcgatgctacaactctggatgataatggtacgatgcttttttttaaaggggaattcgtgtggaagagccacaagtgggatagagaacttatcagtgaacgctggaaaaatttcccctcacccgttgatgccgcattccggcagggacataactccgtatttctgatcaaaggcgataaagtgtgggtctatcctcctgaaaagaaggagaagggctaccctaaattattgcaagatgagtttccaggaattccgagtcctttggatgccgccgtcgaatgtcataggggagagtgtcaggcagagggcgtattgttctttcagggtgacagagagtggttctgggatctggcaactggtaccatgaaagagcggagctggcccgccgtaggaaactgttcttctgcactcaggtggctggggcgttattattgttttcagggaaatcagtttctgcgatttgaccccgttcggggggaggtcccaccacgctatccacgggatgttcgcgattactttatgccttgtcctggccgcggtcatggtcataggaatggtacaggccacggcaattccacccatcacggccctgagtacatgcggtgctctcctcacctggttctctccgcccttacttccgacaaccacggagctacttacgctttctccggcacacattattggcgcttggataccagcagagacgggtggcattcatggccaatcgctcatcaatggcctcaaggtcctagcgccgtggatgctgcattctcttgggaggagaaactctacctcgtacaagggactcaggtttatgtgttcctcaccaagggggggtacaccttggtttctggatatccaaagcggctggaaaaagaagtgggcaccccccacggtattatactcgattccgtcgacgcggcattcatatgccccggcagtagcaggcttcacatcatggccggcaggcgcctgtggtggttggacttaaagtcaggggctcaggccacctggaccgagttgccttggccacacgagaaggttgatggcgcgctgtgcatggagaaaagcttaggccctaacagctgctcagctaatgggcctggcctgtacctcatccacgggcccaacctgtattgctacagtgatgtggaaaaactgaacgccgctaaggcattgccccagccgcaaaacgtgacctccctgcttggatgcactcat

SEQ ID NO: 4638 - DNA, 900 bp, Homo Sapiens
tattattgggacgacaacttcgaccctgctagcctccagggagcgcgcgtgttgctgactggtgcgaatgctggcgttggggaggaattggcttaccactacgctaggctgggatctcacctggtcttgaccgcccacactgaggctctgctgcagaaagttgtgggaaactgtcgaaaactgggagccccaaaggtgttctacatcgcagcagatatggccagcccagaggcccccgagtctgtggtgcagtttgccttagacaaactgggcgggctggattacttggttctcaatcatatcggtggcgctccagcaggcacccgggcccgctccccacaggctacgaggtggctgatgcaggtgaacttcgtctcttacgtgcaactgacctctcgggcactgcccagcctgacagactctaaggggtccctcgtggttgtgagctccctcctgggacgcgtacccacttcattctctaccccatatagcgcagccaaatttgctctggacgggttctttggtagtctccgccgagagctcgacgtacaggatgtaaatgtggcaataactatgtgtgtgttaggcctgagggacagagcctcagctgcagaagctgtaaggtcatcaaccagtaggcccagacagcccgagcaccgtggagtccccctgcagtctcagacagccatgtttctgcctcctactgtacccggggctcgaaccctgaccgagactcctctgagaggctggccccaacccaagatgaaaagctctaggcagaaatccaaaacggagaaaaatgacggacaccttgagcccgttaccgcgtgggaggttcaagtccctagggtgaggaggctgtgcagaggcttggcccgcccgcacctctttggtcatgat

SEQ ID NO: 4639 - DNA, 624 bp, Homo Sapiens
gacactctgatcatcaattgtccaggcttcggccaacaccgagtggatcccgctgcatttcaagccgtgtttgaccgcaaggcaatcgggcccgtcacgaactattctgtggcgacccatgtcaacatctctttcacattatctgctatatggaattgttacagccgcattcataccttcaattgtcaccatgcaaggccgtggcataaccagttcgtccagtggaatcctgatgagtgtggcggaattaaaaaaagtggcatggctacagagaacctttggctcagcgacgtttttattgaagaaagtgttgaccaaacacctgccggtttgatggcgtctatgtctatcgtgaaagccacctccaacacgatctctcagtgtggttggtcagcttccgccaactggactccaagcatttctccctctatggacagggcccgagcttggcggcgcatgtcacgatcctttcagatacatcatcgtactagcttcaggactcgtagggaatgggtgcttctgggaatccagaaaaggactataaaggtgaccgtcgcgacaaaccaatatgaacaggctatcttccacgtcgcaatcaggaggcgttgcagacctagcccatac

SEQ ID NO: 4640 - DNA, 1374 bp, Homo Sapiens
cagttgtcaagagccggccgttccgcccccctcgccgccggctgcccagaccgttgcgaaccggcacggtgcccccctcaacccgaacattgtgaaggcgggcgagctcgcgatgcttgtggttgctgcgaagtgtgtggggctcccgaaggggcagcatgcgggcttcaagaggggccttgtggcgagggcttgcaatgtgtcgtgccctttggggttccagcctctgcaacagttcgccgcagagctcaggcaggtctctgcgtttgcgcaagtagcgagcctgtctgcggtagcgacgcgaatacttatgccaatctgtgccagcttagggcagcgtctagacggtcagagcgattacataggccccccgtaatcgtgctgcagcggggcgcttgtggccaagggcaggaggacccaaattcactgcgtcataagtacaactttattgcagacgtcgttgaaaagatcgctcccgcagtggtgcacatagaattgtttcgcaagctgcctttttccaaaagggaggtgcctgtcgccagtggatctggctttattgtttccgaggacggcctgatagtgacgaacgctcatgttgtcaccaacaagcatcgcgtaaaggtcgagttgaagaatggggctacatacgaagcaaagattaaggacgtcgacgagaaggccgatattgccttgatcaagatcgatcaccaagggaagctgcctgtacttctcctggggcgctctagcgagttgaggccgggagaattcgtggtggccataggatctccattttctttgcagaatacagtcacgacggggattgtatcaaccacacaacgcggaggtaaagaactcggtctgaggaactcagatatggattacatacaaactgacgccatcattaattatgggaactccggtggtccgttagtcaacctggacggggaagtcatcggaattaatacgttaaaggtcacggccggaatcagttttgcaatcccttccgataagattaaaaagttcctgacagagtcacatgataggcaggcaaaaggaaaggcaatcaccaaaaaaaaatacatagggattagaatgatgagtctgacatccagcaaggccaaagaactgaaggatagacacagggattttcccgacgttatcagcggggcgtatattattgaggtcatcccagacacgcccgcagaagccggcggacttaaggagaacgatgtgatcatatccattaatggccagtccgtagtgtccgcaaacgacgtgagtgacgtgattaaacgagagagcaccctcaacatggttgtaaggagaggaaatgaagatataatgataactgtcatccccgaagagattgacccc

SEQ ID NO: 4641 - DNA, 1551 bp, Homo Sapiens
actgatgcattgaacgtgctgctcattatagtggatgatctgaggccaagcctcggatgctatggcgacaagctggtgaggtccccaaatattgaccagctggcctcacattcattattgtttcagaatgccttcgctcaacaggccgtctgcgccccttcccgtgtgagttttctgaccggacgccggccagacaccactcgtctgtacgactttaattcttattggagggttcatgccggcaatttctccactatccctcagtatttcaaggaaaacggctatgtcactatgtctgtcggcaaagtttttcatcctggcatatcctctaatcacacagatgattccccctatagttggagtttcccaccttatcacccttcttccgaaaagtacgaaaatacgaaaacttgtagaggtcctgacggagaacttcatgcaaatttactgtgtccggtggatgtactcgacgtgcccgaaggcacactgcctgataagcagagtacagaacaggccatccagcttttagaaaagatgaaaacttctgcctccccattcttcctggccgtcggctaccacaaacctcatatacccttcagataccctaaggaatttcaaaagctgtatcccttagaaaacattaccctggctccagaccctgaagtccctgacggcctgcccccagttgcttacaacccatggatggacatcaggcagcgggaggatgtccaggctctgaatatatcagtcccctatggaccgatccctgtggactttcagcgcaagattcgccagtcatatttcgccagtgtgagctatctcgacacccaggtagggcgcctgctttccgccttagatgacctgcagctcgccaattccactataatagcgtttaccagtgaccatggatgggcgttgggtgagcacggtgaatgggctaaatactccaatttcgatgtcgccacgcacgtgccattgatattctacgtgcctggtcgaactgcgtcactgcccgaggccggagaaaaactgtttccttacctggacccattcgactcagcttcacaactgatggaaccgggaaggcagtccatggacctcgttgagctggtaagcctgtttcccacactggcaggccttgctggcctgcaggtgccacccaggtgcccggtaccctcttttcacgtggagttatgtcgggaaggtaagaatctgctgaagcacttcaggtttagggacttagaggaagatccgtatctcccaggaaatcctcgggagttgatcgcctattcccaatacccccgaccaagcgacataccgcagtggaactctgataaaccaagtctcaaggatataaagatcatgggctacagcatcaggacgatagactatcgttacacagtgtgggtgggctttaatccggacgagtttcttgccaacttcagcgacatccacgcaggagagctgtatttcgtggattcagatccattgcaagatcataacatgtacaacgattcacaggggggagatctcttccaactcctgatgcca

SEQ ID NO: 4642 - DNA, 210 bp, Homo Sapiens
ggaccagagactttgtgcggagccgaattagtagatgctctgcagtttgtgtgcggtgatcgcggtttttattttaacaaacctacaggatacggctcaagctctaggcgggcgcctcagactggtattgtcgacgaatgctgcttccgaagctgtgacttgcgcaggctcgagatgtactgcgcacctctgaagcccgctaaatctgcc

SEQ ID NO: 4643 - DNA, 315 bp, Homo Sapiens
gagggcgtaacagatctgcgtctgtggctctgtcaaccagccccaagatgcggggagtggacttacaaccctctggagcaatgctgtgacgatggcgtaatactcgacttgaaccaaacgaggttatgtggatcctcttgcactttctggccctgttttcagcactgctgtctcgagagtctcggatcacaaaaccagacagtggtccgttttaaagtacccggtatgaaaccagattgtaagagcagtcctatcacacggatttgtgctcaggagtaccatcccaagtcccccgtatcccgtagtgacctcata

SEQ ID NO: 4644 - DNA, 525 bp, Homo Sapiens
tgtgggcccggaagggtcgttggaagccgcaggcggcctcccagaaagctggtgcccctcgcctacaagcagtttagccctaacgtacccgaaaaaactctgggcgcgtccggacggtacgagggtaagattgctagatctagcgagcggtttaaggagctcaccccaaattacaatcctgatataatttttaaggacgaggagaacacaggcgctgaccgcctgatgactcaaagatgcaaggacagactcaactcacttgccatatcagttatgaatcagtggccaggggtgaagttgagagtgacagaaggctgggatgaagacgggcaccacagcgaagaaagcctgcattatgaagggcgggcggtcgatatcacgacgtctgatagggatcggaataagtacgggctgctggccagactggccgtcgaggccggcttcgactgggtttactacgaatccaaggcacacgtccactgtagcgtaaaaagcgaacactctgcagccgcaaagacaggaggt

SEQ ID NO: 4645 - DNA, 345 bp, Homo Sapiens
ggcctggagtgcgatgggcggactaacttgtgttgcagacagcaattcttcattgactttcggcttatcgggtggaacgactggatcattgcacctaccggctattacggaaattattgtgaagggtcctgcccggcctacctggcaggtgtgccgggcagcgccagcagcttccacactgcggttgtgaaccagtataggatgcgcgggcttaatcccggaaccgtcaattcttgctgcatccctacaaagctgtctactatgagtatgctttacttcgacgacgagtacaatattgtgaagcgggacgtccctaacatgattgttgaagagtgtggctgtgct

SEQ ID NO: 4646 - DNA, 1305 bp, Homo Sapiens
gctgatggacctgatgctgcggcgggaaatgctagtcaggcccaactccagaataatctgaatgtgggctcagataccacgtctgaaacatccttctcactgagcaaagaagcaccaagggaacacctggatcatcaggctgcgcaccagcccttccccagaccgagattccgacaggaaactggacatccttctttgcagcgggactttcctcgatcctttctgcttgatctgccaaattttcccgaccttagcaaggccgacattaacgggcaaaaccccaatatccaggtcacaatcgaggtcgtggacggccccgattctgaagccgataaggaccagcatcctgaaaataagccatcctggagtgtgcccagccctgactggagagcctggtggcagagatcattgtctctggctagggccaattccggtgatcaggattacaaatatgattcaaccagcgacgattccaactttctgaatccaccgcggggatgggaccatacggccccagggcataggactttcgaaactaaagaccagcccgagtacgactcaaccgatggggagggggattggtccctgtggtcagtgtgctcagtcacctgcggaaatggcaatcaaaaaaggacaaggagctgcggttatgcctgtaccgctacagaatcacgaacgtgcgaccgccccaattgtccggggatcgaggatacattccgcacagcagcaactgaagtttcacttcttgcggggagcgaagagttcaatgctaccaaactgtttgaggtcgatactgattcatgtgagcgctggatgtcttgcaagagcgaattcctcaagaaatacatgcacaaagtgatgaacgacctcccgtcatgcccttgtagttatcccactgaggtggcctactcaactgcggacattttcgataggataaaacggaaggactttcggtggaaggatgccagcggcccaaaggagaagttggagatatataaaccaaccgctcgctattgcatacgctctatgctcagcttggaatccactacactggctgctcagcattgttgctatggggataacatgcaactgattacaaggggcaagggagcgggaacccccaacctgatttccaccgagtttagtgctgaattgcactataaggtggacgtgctcccttggatcatctgtaaaggggactggtcccgttataacgaagccaggccccctaataacggacagaaatgcaccgagtctccctccgacgaggactacatcaaacagtttcaagaggcgcgagagtac

SEQ ID NO: 4647 - DNA, 1596 bp, Homo Sapiens
atcataaaccatcctctgctttttccaagagaaaatgccacggtgcctgagaatgaggaagaaattattcgcaagatgcaggcccaccaggaaaagttacaacttgagcagctgagactcgaggaggaggtagcccgcctggcagcagaaaaagaggcactcgagcaggtcgccgaagaggggaggcagcaaaacgaaacccgagtagcctgggacctctggtctacactgtgcatgatcctgtttttgatgatcgaggtgtggcgccaggatcatcaggaaggtccgtcacctgagtgcctcggcggggaagaagatgagctgcctggcctcggaggagctcccttgcaaggtttaacattgcccaataaggccaccctcggacatttctacgaacgctgcatcaggggagcaactgctgatgcagcccgcacaagagaattcctggagggcttcgtcgatgacttgctggaggccctgcggtcactgtgtaatagagacacggacatggaggttgaggactttatcggagtggactctatgtacgaaaattggcaggtggatcgccccctcctctgtcacctttttgttccctttacaccaccggaaccatatcggttccatcctgaattatggtgcagcggcaggagtgtccccctggacaggcagggttatgggcagattaaggtcgttcgagccgatggggacaccctgagctgcatttgtggcaagactaaactcggcgaggatatgttgtgtctgctccatgggagaaactctatggcacccccatgcggagatatggaaaatcttctctgtgctacagactcactgtacctggacactatgcaggtgatgaagtggttccaaactgcgctgactcgcgcctggaagggaatcgcgcacaagtacgagtttgatctggccttcgggcagctggatagcccagggtccttaaaaatcaaattcagaagtgggaaatttatgcccttcaatctcatacccgtgatccaatgcgacgacagtgatttatacttcgtgagccaccttccgcgggagccaagtgagggaactccggcatcaagtaccgattggttgctgagctttgccgtctatgaacggcacttcctccggacgactctgaaggctctccctgagggcgcttgccacctgtcctgcctccagattgcttcattcctcctgagtaagcagtctagactgactggcccatccggcctgtcttcatatcacctcaaaactgccctgcttcacctcctgcttctccgtcaggctgctgactggaaagctggtcagctggatgcccggctgcacgagctgctgtgctttctggagaaatcactgcttcaaaagaaacttcaccattttttcattggcaatagaaaagttcccgaagctatgggcctgcccgaagctgtgctgcgggctgaaccactcaatctgtttagaccatttgtactccagaggagcctgtatagaaagacactcgactctttctacgaaatgctgaagaatgctccggctctgatcagtgagtattctctccatgtgccttctgaccagccaacccctaaaagt

SEQ ID NO: 4648 - DNA, 237 bp, Homo Sapiens
cacccattgatggtgagtgacagaatggatttggacactttggcccgtagccgtcaattggaaaagcgcatgagcgaggaaatgcgtctcttagagatggaatttgaggaacgtaaacgtgccgctgaacagcggcagaaggcggagaatttctggactggcgatacatcttctgatcaactcgtcctgggcaaaaaagacatggggtggccttttcaggctgacgggcaagagggt

SEQ ID NO: 4649 - DNA, 573 bp, Homo Sapiens
gaccggtcaatggagaaaaaaaagggcgaaccccgcacacgggccgaggcgcggccctgggtggatgaagacctcaaagactctagtgacttacatcaagctgaagaagacgcagatgagtggcaggaaagcgaggaaaatgtggagcacatccctttcagccataaccactatccagagaaagaaatggtgaagcgcagccaggagttctatgagctcctcaataaacgtcgcagcgtgcgtttcatcagcaacgagcaggtgccaatggaggtgatagataacgtgattagaactgcaggcacagccccaagcggggcgcacactgaaccctggaccttcgtagtggttaaggacccagacgtcaaacataaaatccgcaaaattatcgaagaggaagaggagatcaactacatgaaacgtatgggacatcgctgggtgacagacctgaagaagctgaggacgaactggattaaggagtatctcgacacagcccctattcttattctgatctttaaacaggttcatgggtttgcagccaatggtaagaaaaaggtgcattattataatgag

SEQ ID NO: 4650 - DNA, 627 bp, Homo Sapiens
ggcgatgaactgctgaacatctgcatgaacgccaagcaccacaagcgagtacctagccccgaggacaagctttatgaggagtgtattccctggaaggataatgcctgctgcacactgaccacttcctgggaagcacatctggatgtttctcctttgtacaattttagcctttttcattgtggcttgctgatgcccgggtgtcgcaaacacttcattcaagccatatgtttttacgaatgttcaccaaatctgggtccctggattcagcccgtgggcagcttgggctgggaggtggccccctctggtcaaggcgagagggttgtcaatgttcccctgtgccaggaagattgcgaagagtggtgggaggattgccgcatgtcttacacctgtaaatccaactggaggggaggatgggactggtcccaaggaaagaaccgctgtcctaaaggagcacagtgcctgcccttcagtcactactttccgaccccagccgacctttgcgagaagacatggagcaactcatttaaggcaagccctgagagacgtaattcagggcgctgtctccagaaatggtttgagcccgcccaggggaaccctaatgtcgcagttgccaggctgttcgcctct

SEQ ID NO: 4651 - DNA, 498 bp, Homo Sapiens
tgtcttcagtgtgacccgctcgttctggaagccctgggacacctgagatcagcactgattccatcacgattccaactggagcaactccaggctagagccggcgcagtgctgatgggaatggagggaccattcttcagagactatgccctcaacgtttttgttggtaaggtagaaacaaatcagcttgacctcgtggcctcctttgttaagaatcaaacccagcacctgatggggaattccctgaaggacgagcccctccttgaggagctcgtgactctgagagccaacgttatcaaggagtttaagaaagtgctgatttcctacgagctgaaagcatgtaaccccaaattatgtcggcttctgaaggaagaggtgctggattgtctgcattgtcaacggatcaccccgaagtgtatccataagaagtattgcttcgtggaccgacaacctcgcgtggcactgcagtaccagatggatagcaagtatccgagaaaccag

SEQ ID NO: 4652 - DNA, 462 bp, Homo Sapiens
tgcctggaatgcgatccaaagttcatcgaggatgtcggcagcctgctcggcaatttgattcctagcgaggtgcccggtcgcacacaattattggaaagacaaataaaggaaatgatccatctctcattcaaagtgtcacatagcgacaagcgcctgagggtcctggcggtgcagcaggtggttaagctgcgtacgtggctgaagaacgaattttataagctcggtaatgaaacttggaaaggcgttttcatctatcaaggcaagttgctcgacgtgtgccagaatctggagagtaagttgaaggaattgctgaagaattttagtgagatagcttgtagtgaggactgtattgtggtcgaggggcctattttggactgctggacttgtctcaggatgacaaaccgatgcttcaaaggcgaatattgtggtgacgaagatccgcgaaaagcagagaacagagag

SEQ ID NO: 4653 - DNA, 207 bp, Homo Sapiens
gagacccttccccagttcagggtggacgggaggggcgggaataacggtggggtttcccgcgtgtcccctgtgtcacggggctcccaggaggaagaagaggatgaggatgatagctacaccttccatcacggaataacccccggtgaaatggggacaggcggaagctcatctctttcaacattgggtgggtctttttttacagatcct

SEQ ID NO: 4654 - DNA, 258 bp, Homo Sapiens
atgcattttctgactatatacccgaattgctctagtggggtagtgcgggctcaatcccgaactgagcagaagaaccctctgggactggatgacttgggcatacaaaacctcggccagaccgtgtctctggcgcccgcggtggaggccgccagcatgctgaaaatggaaccccttaactcaactcaccctggtacggccgcaagctccagccctttggaaagccgggccgccggtggaggctctggtaatgggaacgaa

SEQ ID NO: 4655 - DNA, 354 bp, Homo Sapiens
ccactctatcagaagagcgtctggacacaggagtctaagtgtcacctcattgagacaaacatccgtgatcaggaggagctgaaaggaaaaaaggtgccacagtatccctgtctttgggtgaacgtaagtgctgccggaaggtgggccgtgctgtaccataccgaagatacaagagaccaaaaccaacagtgctcttatatcccaggcagtgtagacaactaccagactgcccgcgccgatgtcgaaaaagttcgtgctaagttccaagaacaacaggttttttactgcttctcagccccacgcgggaatgaaacaagtgtgttatttcagcgcctctatgggccccaagcactt

SEQ ID NO: 4656 - DNA, 687 bp, Homo Sapiens
attatcaaggggtttgagtgtaagccccatagtcaaccttggcaagccgcactgttcgaaaagactcggctcctgtgtggagcgactctgatcgcccctcggtggttactgacggcggcacactgcttgaagccgcggtacatcgtgcatctcggacagcacaaccttcagaaggaggaggggtgcgagcagactaggacggcaaccgaatcttttccacacccaggctttaacaactctttgcctaacaaggaccacagaaacgacatcatgcttgtgaaaatggcctccccagtgtcaatcacttgggcggtgagacctctgaccctgagtagcaggtgtgtgactgccggaacaagctgtctgatatctgggtggggctctacatcatcccctcaactgcggctccctcataccctgcggtgtgccaatatcacgatcatcgagcatcagaagtgtgagaatgcctaccctgggaacatcaccgacaccatggtctgcgcttcagtgcaggaagggggcaaggatagctgccagggtgatagcggaggacctctcgtgtgcaaccaaagcctgcaaggaataatctcttggggacaggacccttgcgctatcacccgcaaacctggagtatatactaaggtatgtaaatacgtggattggatccaagaaacaatgaaaaataat

SEQ ID NO: 4657 - DNA, 693 bp, Homo Sapiens
gccacaccgaagattttcaatggaactgagtgcggacggaatagtcagccgtggcaggtgggtttattcgagggcacctctctgcgttgcgggggcgtcctgatagatcatagatgggtgctcacagcggctcattgctctggatccagatattgggtccgattgggcgaacactcactttcacaactggattggactgagcagattcgccactccggcttttctgtgacccaccccggttaccttggggccagtacctcccacgaacacgatctgcgcctgttgcgcctgcggttgcctgtcagggtgacaagctctgtccaaccccttcccctgcccaacgattgcgcaaccgccggtactgagtgtcacgtctctggctggggcataacgaatcatcctcgcaatccgtttcctgatctccttcagtgcctgaacctctcaatcgtgtcccatgccacttgtcatggagtttaccctggccggattacgtcaaacatggtttgtgccggtggggtgcccggccaagatgcttgccagggggatagcggaggaccattggtttgcggcggagtgctgcagggattggtgagctggggatccgttgggccctgtggtcaggatggcatccccggagtatacacctatatttgtaagtatgtcgactggatccgcatgatcatgcgtaacaac

SEQ ID NO: 4658 - DNA, 684 bp, Homo Sapiens
gtgctcgggggccatgagtgtcagccccatagccagccttggcaggccgctctcttccaaggccaacagttgctctgcggcggcgtgctggtgggcggaaattgggtgctgacagcggcacattgcaagaaacctaaatacacagtcaggctgggcgatcacagcttacagaataaagacggtccagagcaagagattcccgtggtccagtccattccccatccctgctataacagttctgatgtggaggaccacaatcatgatctgatgctgctgcagctccgagaccaggcttccttagggtcaaaagtcaaacctatctcactggccgatcattgcacccagcctggacaaaaatgcacagtgagcggctggggtacagtcacaagtcctagggaaaatttccccgatactcttaactgtgcagaggtcaaaatctttcctcaaaaaaaatgtgaggacgcataccctggccagatcactgacggcatggtgtgcgccggatctagtaagggcgccgacacttgccagggtgactccggtggacctctcgtttgcgatggcgccctgcaaggcataacttcttggggctccgacccatgcggcaggagtgataagcccggcgtgtacacaaacatctgtagataccttgactggatcaagaaaattatcgggtccaaaggc

SEQ ID NO: 4659 - DNA, 1017 bp, Homo Sapiens
ggcagcctgcactcaccgggcctgtcagagtgctttcaagtgaatggggcggactaccgcggtcaccagaatagaactggacctaggggtgccggccgtccatgtttgttttgggaccagacccaacagcattcctatagcagcgcatccgatcctcatggccgttggggtctcggggctcacaatttctgtcggaatcccgatggagacgttcaaccctggtgttatgtggctgaaactgaagagggaatctactggaggtactgtgatattccctcctgccatatgcctggttatttaggttgctttgtggattcaggggctcccccagccctttcaggcccctcagggacttccacgaagttgactgtgcaggtttgtttacgcttttgtcgtatgaaaggctatcagctggctggagtcgaggcggggtacgcctgtttctgcggaagtgagagcgatttggcaaggggaaggttagccccagccacagactgcgatcagatatgcttcgggcacccgggccagctctgtggcggcgacggacgtctcggagtatatgaggtgtccgttggatcctgtcagggcaattggactgcaccacagggggtgatctacagcccggatttccccgacgaatacggacccgatcgtaactgctcctgggctctggggcctcctggtgccgccctggaattaacctttcgcctgtttgagttggccgatcctagagacagactcgagctcagagatgccgcctcaggatcccttctgcgcgcctttgacggggccagaccgccaccgagcgggccccttagactgggtacagccgcactcctgttgacctttcgcagtgacgcccggggacacgctcagggctttgcattaacatacagagggctccaggatgctgctgaggatcctgaggcacccgaaggatccgcccagacccctgccgccccacttgatggggccaacgtcagttgctctcctcgacccggggccccacccgcggcc

SEQ ID NO: 4660 - DNA, 1023 bp, Homo Sapiens
tccaacagtgatggctcctttcactacaaagataagttatacaggagcgccagtcaggccctgcaggcatacatagatgatttcgacttgggacagatttatcctggcgcctctacagggaagattaacatcgatgaggatttcactaatatgagtcagttctgcaattacatttacaagcctaacaacgcctttgagaatctggatcataaaaagcactcaaatttcattagttgcagacgacacaccgttaatgacatcgattctatgtcactgaccaccgatgacctgttgcgtctgcccgctgacggctccttcagttacacctacgtcggacccagtcacagaacctcaaagaaaaacaagaaatgcagaggccggttgggcagcctggacatcgaaaaaaatccacatttccaaggtccttacacatcaatggggaaggataactttgtgactcctgtgattcggtctaacatcaatggaaagcagtgcggcgataaaattgagctcttaatactgaaggctaaaaggaatttggagcagtgcaccgaagagctgcctaagagtatgaaaaaggacgatagcccttgctccctcgacaagctcgaggctgatagaagttgggagaatattcccgtgacctttaagagtccggtgcccgttaacagcgatgactctccccagcagacttctagggccaagtccgcaaagggcgtcctggaggatttcctgaacaatgataatcagtcatgtaccctcagcggcggcaaacaccatggaccggtggaggctctgaagcaaatgctcttcaatctgcaggccgtgcaggagcggtttaatcagaataaaaccactgatcctaaagaggaaatcaagcaagtttccgaggatgatttctccaaactgcagctgaaggaaagtatgatcccgataaccaggtccctgcaaaaggccctgcatcacctctcacggctgagggatctcgtggacgataccaacggggaacgcagtccaaagatg

SEQ ID NO: 4661 - DNA, 1248 bp, Homo Sapiens
ttctggcttctcaacgtgctctttccaccgcataccacacctaaggctgaactgtcaaatcacacgcggccagtcattttagtgccaggttgtctggggaatcagctggaggctaaactggacaagccggacgttgtaaattggatgtgttataggaagacggaagacttttttactatctggttggatctcaacatgttcctccctctcggcgtggactgttggattgacaatacccgtgtcgtgtacaaccgttcctctggcctggttagtaatgcacctggtgtccagatccgggtgccggggttcgggaagacctattccgtcgagtatctggacagcagcaagctggccggatacttgcacactctcgtccagaacttggtgaataacggctatgtaagggacgagacagtccgggccgcaccttatgattggcgcttagagcccggccaacaagaggaatattatcggaaacttgcggggctggtggaggaaatgcacgcagcctatggcaagcctgttttcctgatcggccactccttaggatgcctgcatctgctgtacttcctgctccggcagcctcaggcatggaaagaccggtttattgacgggtttatcagcctcggagcgccttggggagggagcattaaacctatgcttgtgctcgctagtggcgacaatcaagggattcccatcatgagcagtattaaactgaaggaagagcagcgcatcacaaccaccagcccttggatgtttcccagccggatggcttggcccgaggatcacgtctttatcagtacaccatcctttaattacaccggacgggactttcagagattcttcgcagacctgcacttcgaagaaggatggtatatgtggctgcagtcaagggaccttttagccgggttacctgcccccggagtcgaggtttattgtctgtatggagtcggcctccctacaccgcgaacttacatctacgaccatgggttcccatacacagatccggtaggcgtgctttacgaagacggggacgacacggtagctacaagaagcactgagctgtgcggcctgtggcagggacggcagccccagcccgttcacctcctgccgctccatggaatccaacaccttaatatggtctttagcaatttaaccctcgagcacataaacgctatcctcctcggagcctaccgacaaggtcctcctgccagccctactgcctctcctgagcctcctccgcccgaa

SEQ ID NO: 4662 - DNA, 474 bp, Homo Sapiens
caccacctgttagcttccgatgaggagattcaggacgtttccgggacctggtatctgaaggccatgactgtggaccgcgaattccctgaaatgaatttagaatccgtgacccctatgacactgaccaccctcgaaggcgggaacctggaggcaaaagtcactatgttgatttcaggccgttgtcaggaagtgaaagcagtcttagagaaaactgacgaaccaggaaagtacactgccgacggcggcaagcacgtggcctatattatcaggtcccatgtcaaagatcactacatcttttactgtgagggcgaacttcatggcaagccggttcgcggtgtgaagctggttggccgggatcccaagaataatctggaagccctggaagacttcgaaaaagccgctggggccagaggcctgagcaccgagtcaatacttattcccaggcaatccgagacttgttcccccggcagtgat

SEQ ID NO: 4663 - DNA, 504 bp, Homo Sapiens
gcgggctcccaggttcaagaatggtaccctagggaatctcacgcccttaattggaataaattctcaggattttggtacatactggcgacagcaactgacgcccaggggtttctgcccgctcgcgacaagaggaaactgggagctagcgtggtcaaggttaataaagtaggccaattgagggtgctgctggcattcagacgaggccagggctgtggccgggctcagccaaggcatcccggaacttccggccacctctgggcttcattgagcgttaagggcgtcaaggcattccatgttctgtccactgattacagttacggacttgtatatctgaggctgggcagagctacccagaactataaaaatctcctcctcttccacagacagaatgtgtcttcattccagtctcttaaagagttcatggatgcctgcgatattcttggcctgagcaaggctgccgtaattcttccaaaagatgcctctcgaacacacactatcctgcct

SEQ ID NO: 4664 - DNA, 519 bp, Homo Sapiens
cagacacccacaccactgcctcttcctcctcctatgcaaagctttcaggggaatcagtttcaaggggagtggtttgtcttagggctcgcagggaattcattccgcccagaacacagagctcttctcaatgctttcactgcgacttttgaattatctgatgatggccggtttgaagtgtggaacgcaatgacccgcggccagcattgcgatacctggtcctacgtattaattcccgccgcccagccaggtcagttcacggtcgaccatggagtggaacccggcgccgatcgtgaagaaaccagggtagttgatagcgattatacgcaatttgctcttatgctttcaaggagacatacttctcgcctcgccgtgttgaggatcagcttattaggacgctcatggttattgcctccaggcaccttggaccagtttatctgcctgggccgtgcccagggactttctgatgacaacattgtgttccctgacgtaacaggttggtccccacaggcctccgtgtgc

SEQ ID NO: 4665 - DNA, 432 bp, Homo Sapiens
catcacctcctcgctagtgatgaagagatacaagacgtgtcagggacctggtatctcaaggccatgaccgttgacagagaattgcctgagatgaacctggagtctgtaactcccatgacattaaccattttagaaggaggcaatctcgaggcgaaagcaacgatgctgattagcggccaatgtcaggaggttaaggtgatacttgagaagactgacgagccgggaaagtatacagccaaccggggcaaacacgtggcctacattattcggtcccatatgaaggaccattacatcttttattgcgagggccgcgatccagaaaacaacctcgaggccttagaggacttcgagaaggcggcaggggccagagggcttagtaccgaatccattctgattcctcgccagtctgagacttgctctcccggatccgat

SEQ ID NO: 4666 - DNA, 624 bp, Homo Sapiens
ttagagacagctgatctggccgagctctgcggtcagacatggcagggggatggtttgcttttgcgctcccacgcagcctcacgccgattctacttcgtggcccccgacaccgattgcggactctgggtccaggccgcagctccaggagaccggattagattccagttcagatttttcctggtctatagtttaacccccgctcccccagctttaaacacctcctcccctgcccccgctgacccttgtgcccctggatcctacctccagttctatgaggggcccccgggcgcccccagacccctcgggtctcctctgtgcggcctcaatattcccgtcccagtggcatcctccggcccattcctggggttacggttagtgacgcgaggaagacagcccagagtggactttgtaggcgaagtgacttccttccggctgggtccctgtggcgcttacttccggtgtcagaacgggcggtgcattcctagctcactcgtttgtgacccatggggtatggataattgtggcgatggcagcgaccagggtagttggagcccggcagactgtcgcgggccttcacccgtccccagccagacaggaagcactgatgctcacacaagtcgcagc

SEQ ID NO: 4667 - DNA, 468 bp, Homo Sapiens
cagctgctgccaggcaataatttcactaacgaatgtaatattcccggtaacttcatgtgctctaatggacggtgcattcctggagcctggcagtgtgatggactcccagactgcttcgataaatccgacgaaaaggagtgtcccaaggctaagtccaaatgcgggccgacgttctttccatgtgcatccggtatacactgcatcatcggacggtttaggtgtaatgggtttgaggactgtccagatggctccgacgaagaaaattgcacggctaatccactcctgtgtagtacagctcggtatcattgtaagaacggcctgtgcattgacaagtcttttatatgcgacggccagaacaattgtcaggataatagtgacgaggaaagctgcgagagcagccaggaacccgggagcggacaggtcttcgtcacgagtgagaatcagttggtgtattatccgtcaattaca

SEQ ID NO: 4668 - DNA, 930 bp, Homo Sapiens
gggacaagtaatttgtcagagactgaaccaccgctgtggaaggaaagtccagggcagctctctgattaccgggtggaaaatagcatgtacatcatcaacccgtgggtgtacctggagagaatgggtatgtacaagattatcctgaatcagacggcgaggtactttgccaagttcgcacctgacaatgaacaaaacatcttatgggggttacccttgcagtatggatggcagtatagaacagggcgtctggctgaccccactagaaggacaaattgtggatacgagagtggggaccacatgtgtatcagtgtagatagctggtgggctgacctgaattactttcttagcagccttcccttccttgccgccgtggactccggtgtcatgggcatttcctccgaccaggtcagattgctccctcctccgaaaaatgagcgtaagttctgttacgacgtgtctagctgtagatcttcctttcctgagacaatgaacaagtggaacaccttttatcagtacctgcagagtcctttctcaaaatttgacgacttactgaagtatctctgggccgcacatactagcactctggctgacaacatcaagtctttcgaagaccgatatgactactactctaaagctgaagcacactttgaacgaagttgggtgctcgccgtggaccatctcgccgcggtactgttccctaccaccctgatccggagctataaattccagaagggcatgccccctcgcatcctgctcaacactgacgttgcacctttcataagtgatttcaccgccttccagaacgtggtgttggtgctgctcaacatgctcgataatgtggataagtcaatcgggtacttgtgcaccgagaaaagtaacgtgtatcgggaccattccgaaagctccagccggtcctatggtaataacagc

SEQ ID NO: 4669 - DNA, 363 bp, Homo Sapiens
tcaagagagcccctccggccgtggtgtcacccaatcaacgcgattctggctgtggagaaggaaggatgccccgtgtgcatcaccgtaaatactacaatatgtgctggctattgtcctacaatgatgagagtgctgcaggcggtgctgccaccgctgccccaagtagtgtgtacttatcgtgacgtgcgcttcgaatccattcgactgcccggctgcccaagaggggtggatcctgttgtatctttcccagttgccctcagttgcagatgcgggccgtgtcggcgcagtaccagcgactgtggcggtcccaaagatcacccattaacctgcgatcacccgcagctgagtggactcctgttcctc

SEQ ID NO: 4670 - DNA, 249 bp, Homo Sapiens
gcgacatgtaaggacgagaagggcaaacaggagatggagaccggccaacagccatccggactctctgccacactgacaaaagtcaagtgtgccaaaagacagaagaccgtcgtgcgagtccgattctacatgctcagcatgaagaacaaggcctgtaggaagaaccttagcaaggggtacaatcagcgtcctgaagggtccaaagaggagagccatatggtggtaaaagaaaaacgcaaaggagatcac

SEQ ID NO: 4671 - DNA, 369 bp, Homo Sapiens
caacacttttccgctgccgattcacccggtaccgaattcacacctgcaacaaccacatctcggttgttgcacgtgctgtacgtatgtagttgttccctcgttgccgagaaggacgatttctcctcaccccatagtcacagtctcctgctggtgtctctcccagagcctcactttgagctgagtgaggggctccgccttgccttcaggggctcacagagctctgactccatcaggtaccgtcggggcgggaacgagggagtgaggccttggcgtgctggggccacaggcctgccacccaccggaaaagacattagcgtctccctggcacatgaactgtactccctgctcaagcagctgcaaatgtctatc

SEQ ID NO: 4672 - DNA, 1170 bp, Homo Sapiens
gtccacatgcctaccaaggctgtcgaccctgaagcatttatgaacatctctgagatcatccagcaccaaggctacccctgcgaagaatacgaagtagcgaccgaagacggatatatcctgtccgttaacagaatcccaagagggctcgtccaaccgaaaaaaacgggctcccggccagtggttttgctgcagcatggcctcgtaggcggcgcgtcaaactggatcagcaatctgcccaataattcactggggttcattctggccgacgccgggtttgacgtgtggatgggtaatagtaggggtaacgcctggtccagaaagcacaaaactctcagcattgaccaggatgagttctgggcctttagctacgatgaaatggctaggtttgacttgccagcagttataaacttcattctgcagaaaacgggccaagagaagatttactacgttggatattcccagggtactacaatgggatttatcgccttttcaactatgcctgaactggctcagaagattaaaatgtacttcgccctggcccctatcgccacagtgaagcatgctaaaagtcctggaacaaagttcctcctgctgccggatatgatgatcaaaggactctttggtaaaaaagagttcttgtaccagacaagattcctgaggcagctcgtaatctatctctgcgggcaggtgattcttgatcagatttgctctaacataatgctcctgctgggcgggttcaacacgaacaatatgaacatgtctagagcttcagtttatgcagctcacacacttgcagggactagtgtccaaaacatcttacactggagccaggccgtcaacagcggagagcttcgcgcttttgactgggggtcagagaccaagaacctcgagaaatgcaatcagcccacccctgtccggtatagagtcagggatatgacggtccctactgctatgtggacggggggacaggactggctctcaaatcctgaggacgtgaagatgctcctgagcgaggtgacgaacctgatctaccacaaaaatattcctgagtgggctcacgtcgactttatatggggcttagacgcaccccaccgaatgtataacgagattatacaccttatgcaacaggaggagactaacctcagtcaaggtaggtgtgaagccgtcctc

SEQ ID NO: 4673 - DNA, 1140 bp, Homo Sapiens
ggcggatttttggatcttgaaaacgaggtaaatcctgaagtgtggatgaacacatcagagattatcatctataatggttatccgtctgaagaatacgaggtcaccacagaggatggctatatactcctcgtgaatcgcatcccttatggcagaactcacgcacgtagcactggtcccagaccagtcgtgtatatgcagcatgcactgtttgccgataatgcatactggcttgagaattatgctaatggatccctcggatttttgttagcagatgcaggatacgatgtctggatgggcaacagtcgaggcaatacatggtccagacgtcacaaaaccttgagcgaaactgacgagaagttctgggcattctcctttgacgaaatggctaagtatgatttaccgggggtaatcgactttattgttaataagaccggacaggagaaactttatttcatcggtcattctctggggaccacaatcgggtttgtggcctttagcaccatgcccgagttagcacaacggattaagatgaatttcgccctcgggcctacgatatccttcaagtaccctacgggcatcttcactagattttttctgctgcccaacagcataattaaagccgtgtttggaaccaaaggcttttttttggaggataaaaagaccaagatcgcctctactaagatctgtaacaacaaaatcttatggttgatctgttccgaatttatgtctctctgggccggaagcaacaagaaaaacatgaaccagagtaggatggacgtatacatgagccatgcaccaactggttcttccgtccacaatatcctgcatattaagcagctttatcactccgatgaatttcgcgcctatgactgggggaacgacgcggacaatatgaaacattacaatcagtcccatccccccatctatgacctcacagccatgaaagtcccgacggccatttgggccgggggacatgacgtactggtcacaccacaagacgtggcccgtatcctgccccaaatcaagtcactccactatttcaaacttttacccgactggaaccatttcgactttgtttggggcctggacgcacctcagcgcatgtactctgagataattgcccttatgaaagcttatagt

SEQ ID NO: 4674 - DNA, 282 bp, Homo Sapiens
agccctggtcccaaagatggcagccaaaccgaaaagaccccttccgcagatcagaatcaggagcagttcgaagaacactttgtggcttccagtgtaggggaaatgtggcaagtcgtcgatatggcccagcaggaggaggaccagagttcaaaaaccgctgcagtgcacaagcatagttttcacctgagcttctgctttagcctggcaagcgtgatggtgttctctggcggtccattgcgtcgcacctttcccaacatccaattatgctttatgctcacccat

SEQ ID NO: 4675 - DNA, 333 bp, Homo Sapiens
ggacctagcgtgcaggaatgctaccactccaatggtcagagctaccgcggtacatacttcactaccgttactggacgcacctgtcaagcatggtcatccatgaccccacatcagcattctcgaacacccgagaaatacccaaacgacggactcatcagtaattactgtaggaacccagattgcagcgcgggtccctggtgttacaccacagacccaaatgtgcgctgggaatactgcaatcttacaagatgcagcgatgatgaaggcaccgtgttcgttcctctgacagtgattcctgttcccagtctggaagacagctttattcaggtggca

SEQ ID NO: 4676 - DNA, 411 bp, Homo Sapiens
ggatacggaccgcagaagaaattgaacctgagccacaaagggataggggagccttgccggcggcatgaggagtgtcagtctaactgttgcaccataaacagcctcgctccgcacacattatgcactcccaaaaccatctttctgcagtgcctgccatggaggaaaccgaacggttacagatgcagccacgatagcgagtgtcaatctagctgttgcgttcgaaataacagcccccaagaattgtgtaccccacagtcagtgttcctgcagtgtgtcccttggcgtaagcccaacggtgacttttgtagctcacaccaggaatgtcatagccagtgttgcatccagctgagggagtactccccgtttcgatgcatcccccgcacagggatactcgctcagtgtctgccactc

SEQ ID NO: 4677 - DNA, 651 bp, Homo Sapiens
atgagacacgaagagttgctcactaagacatttcaggggcccgcagtcgtttgtggtacacccacgtcacatgtctatatgtttaagaatggcagcggcgatagtggtgactcttccgaagaggaaagccaccgcgtggtcctgagacccagaggaaaggaacgccataagagcggcgtgcatcagccgccccaggccggagccggcgacgtcgttctgctgcagagagaacttgcccaggaggattcacttaacaaactcgccttacagtacggatgcaaggtagctgatattaagaaagtgaataacttcatcagggagcaggacttatatgcgcttaaaagtgtgaaaatccccgtgcgtaaccatggtattcttatggagacccataaggagctcaagcctctgttgtcacctagctcagaaaccactgtgacagttgagctgcccgaagctgacagagctggcgccggcacgggagctcaggcagggcagcttatggggttcttcaaaggcattgaccaggatatcgaaagggccgtccagtcagaaatcttccttcacgagtcatactgcatggatacctctcatcagcccctgctccccgccccacccaagaccccgatggatggcgccgactgcggaatccag

SEQ ID NO: 4678 - DNA, 780 bp, Homo Sapiens
tctccaactatcttctatcgagactgttggatccggcgctttccaggtctcttgataaatctggaagagtcccaaaaactcggcgctcagtttttgaagtactacagcgagtccacggggcagaaatgcagcaggtcttgctgcctgcggaaagacgtaagctgcaatctggccgtgttctaccacagtcccatccatgacaatatcaactgcctgcatgtacactgccccaccctcgaaagttgtatcctggaaccagggacctccgcaatcctctataatatcaccgacggtatcgacccagacctcctggtatttgaacagagtcccacgtatctgaatactaggtcctctagcaacaggtgggacaggttgcgcatcctgaaggctatgaacttagataagcaaacaactactattaacggcatgctgcctagcaccgaggcccccagttctacgacacatcaggatctggtggtgaacacaaactctacaagttacagtaaagagcttactacagacttctgggctcgtttcacatctctcaacgagtccattacaacaaaaatcaataaggtgtcaccctcaacagattttatatccaacccagacaacaaaacaatttcaccattctttgagcccatcgacaccaaactttctcacatgcccgtaccacccgggcttaattcctcaaaacaactgctgaataagactaagggttacaatagcagaaaccacacaagtgccaatgaagatgaggtaagtgtgacaagtaagaca

SEQ ID NO: 4679 - DNA, 954 bp, Homo Sapiens
cagggtcttacccagactcccacagagatgcagcgtgtatctttgcggttcggaggaccaatgaccagatcctaccgttcaacagcgaggacgggactcccaaggaagactaggattatacttgaggatgaaaatgatgctatggccgacgcagatagattggcaggcccagcagccgccgagttactggctgcaactgtctcaacaggattcagcaggagttctgccatcaacgaggaggacggcagttccgaagagggtgtggtaattaatgccgggaaggatagtacttctcgcgagctccctagcgcgacacccaatactgcgggaagtagcagtactagatttatcgccaacagccaggagcccgagattaggttgacctcaagcctgccaagatcacccgggcggtctacagaagacttgcctgggagtcaggctaccctgtcacagtggagtactcctggaagcactcctagcagatggccgagcccatcacccaccgctatgccgagccctgaggaccttagactggtgctgatgccctggggcccttggcactgccattgcaagtcaggcaccatgtccagaagtagatccggaaagctgcacggactgtccgggaggctgcgagtaggcgcactcagtcagctgcgcacagagcataagccttgcacgtaccaacagtgcccctgtaataggcttcgtgaggagtgcccactggacacatcactgtgcacagataccaattgcgctagtcaaagcacaacatccaccagaactaccacaaccccatttcctactatacacctcagaagcagtccgagcttgcccccggcatccccgtgcccggcccttgctttctggaagcgggtgaggatcggcttggaagacatttggaatagtcttagtagcgtgtttacagaaatgcagccaatcgaccgaaaccaacgc

SEQ ID NO: 4680 - DNA, 810 bp, Homo Sapiens
gggtacagcgaagaacgatgctcctggagaggctctggactgactcaagaacccggcagtgtgggacagctggctttagcatgcgccgagggtgccgtagagtggctgtatcccgctggcgctctgaggctcactttagggggccctgacccacgtgcaagacccggcatcgcttgtcttaggcctgtgcggccttttgctggagcacaagtctttgccgagcgggccggcggtgccttggaactgctgctcgcagagggacctggcccagcaggtggaaggtgcgtgcgttggggcccacgcgagagacgagccctctttttacaggcgactcctcatcaggacatctcaagacgggtcgctgcatttcgtttcgagctccgggaggacgggagaccagagctcccaccccaggcacatggtttgggcgtggacggagcctgtcgtccctgtagtgacgccgaactgctgctggcagcctgcacttccgattttgtaatccatggcataatccatggcgttacacacgacgttgagcttcaggagagcgttattaccgtggtggccgcccgggttttgagacagaccccacctctgtttcaggcagggcggagtggcgaccaggggctgacatccatacgaacacctcttcgttgcggcgtacaccctggtcccggcacattcctcttcatgggttggtcaaggttcggcgaagccaggttgggctgcgcccccaggtttcaagaattccggagagcttacgaagcagcccgcgcggctcacttacacccctgtgaagtggcccttcac

SEQ ID NO: 4681 - DNA, 798 bp, Homo Sapiens
cagtattccagcgatcggtgttcctggaaagggtccggactgactcacgaggctcataggaaggaagtcgagcaggtctacttgaggtgtgccgccggggcagtcgagtggatgtacccaaccggagccctgatcgtcaacctccgaccaaacacattctctccagcacgacatctgaccgtgtgtataaggagcttcaccgatagctctggggcaaacatttatctcgagaaaacaggcgagctgaggcttttagtcccagacggggacggacgccctggcagagtgcagtgtttcggactggagcagggaggtctgtttgtggaagcgacaccgcagcaggatatcggaaggcggactacgggcttccagtacgagcttgtgcgccggcacagagcctctgacctgcatgaactttctgccccctgtaggccctgctcagacacggaggtgctcttggctgtttgcacaagtgacttcgctgtcaggggctcaattcagcaggtgacccacgagcctgagcgtcaagattctgccatacacctcagggtgagccgcctttatcgacagaagtcacgtgtatttgagccagttcctgaaggcgatggccactggcaagggagagtgcggaccctcctggagtgcggcgtccgccccggacatggcgattttctcttcacaggccacatgcactttggagaggccaggttgggatgcgccccccgcttcaaggacttccagcgcatgtatagggacgcccaggagcgcggccttaacccctgtgaggtgggtacagat

SEQ ID NO: 4682 - DNA, 1011 bp, Homo Sapiens
tgtgccgagctgagacgggcaggtccaggttcccccacaaggagcgcaccccctggaccagcctggaggcctcccgggccacacctgccgcctgcacccggccagccgagaggggcctccaggcggcaggtgacctatgtgagaagtggacgccgcgctccaccaggaggcggggggtctgggacgcctgaacctggctgttgcgctccgcggggccgtccccggcgtaagggcccaaggtggcacatcgacctgcagccctgggcggggagtgctcaatccctcgacgaggaagcctggcggtttctgcgctatatctctactacacagatcgcatgtaatcacatgaatacggacagcctggctacagacagttctccaactcacaagccttggagcgtgtgccttgacgatcggttcaacctggcccaccagatccgaaacaaacaatgtagactctactcattgggtctgggctccgatgatacccattttgaggtgagcatggccaacaacggctgcgaagttcaccgcttcgatccttcagtgaagtcagcccatatcttggagtcccaacacttatggtatcatcggctcagtatcgactggcgggaccctcaccctgcagttgccgcacagaaacctcactcaaatactcgaaagctcgggagcatcctgaatgagttcggacaccataagatagatgtcctcaaggccgatctggaatctgccgagtggaaagtcctggagaatctcatcttagaggatgtcctggagcaaataggacagctgatttttgaaattcacctccattggccaggttttgaggtgtccggcagcgattcaagcgttgttagattttggtactccttgcttaaagagctcgaacagaaagacttccggctctttcactcctataaagatctgagcaagccccaacttttcttaaagaaagacatctttaatgcttcatcttgttacaccctctcctgggtcaacaccaggtggaag

SEQ ID NO: 4683 - DNA, 663 bp, Homo Sapiens
ctcctgggatgctggcagcctctgtgcaaaagctactttccctacctcatggctgttctgacccccaagtcaaataggaaaatggagagcaagaagcgggaactcttctcccagattaaagggctgacgggggcctcaggcaaagtcgccctgctggagctggggtgtggcaccggagccaattttcaattctatcctcctggctgtcgcgtgacatgtcttgatcccaaccctcatttcgaaaagttcctgaccaagtccatggcggagaacagacatctccagtacgagcggtttgtcgtcgcaccaggcgaggatatgcggcagctggctgatgggtccatggatgtggtggtgtgtaccctcgttctgtgcagcgtgcagtcaccccggaaggtgctgcaagaggtccgccgggtgttgagaccaggcggggtgctgttcttctgggaacatgtcgctgagccatacggtagttgggcgttcatgtggcaacaggtctttgaaccgacctggaaacacattggtgacggctgttgcctgacaagagaaacctggaaggaccttgagaacgcccagttcagcgagatccagatggaaagacaacctccacccttaaagtggttgccggtcggtccccatatcatgggcaaggctgttaag

SEQ ID NO: 4684 - DNA, 1467 bp, Homo Sapiens
cagctgcaggccgcaccccccagcggcgcaagtcactcccccctgccagccgggggcttaacaactacgacaactactcccaccatcaccaccagccaagcagcagggactcccaaggggcaacaggagtcaggagtgtccccgtccccccagtctacctgcggcggactcctgagtggacctcggggctttttctctagcccaaactatcctgacccttatccacctaatacacactgcgtgtggcacatccaggtagccaccgatcatgccatccagctcaaaattgaggcactttctatcgaatccgtggcctcatgtctgttcgatcgccttgagttgtcaccagagcctgaggggcctttgctccgcgtgtgcgggcgcgtgcctcccccaacactgaacacgaacgcctcacacctgctggtggtgtttgtttccgattccagcgtcgaaggattcgggttccatgcgtggtatcaggccatggcccccgggagaggctcatgtgcacatgacgagtttcgatgcgaccagctcatttgcctccttcccgattccgtttgtgacggctttgccaattgtgccgatggcagtgacgagaccaactgttccgcgaaatttagcggttgcggaggcaaccttacgggtctccagggtacgtttagtacaccatcttacctccagcagtatccccatcaattattatgtacctggcacatatccgtgcctgcaggccatagtatcgagctgcaatttcataacttcagcttggaggctcaggacgagtgcaagttcgattacgttgaggtctacgagacgtcttccagtggtgcctttagcctgctgggccgattttgcggtgcagagcccccacctcatctggtgtccagccatcatgaacttgctgtgttgttccgaactgaccacggtatttcctccggaggattctccgccacatacctcgccttcaacgcaactgagaacccctgcggaccgagcgagctctcttgccaagccggaggctgcaaaggagtgcagtggatgtgcgacatgtggcgcgactgtaccgacgggtccgacgataattgcagtggacccctgttccctccccccgagcttgcttgtgagccagtgcaggtggaaatgtgtctgggtcttagttacaataccactgccttcccgaatatctgggtgggtatgattactcaggaagaagtcgttgaggtgctcagcggttacaagtctcttacctcccttccatgttatcagcattttagacggctgctgtgcggactgttagtcccacggtgtactccgctgggttcagtacttcccccatgccgaagtgtatgtcaggaggccgaacatcagtgccagtctgggctggccctgctcgggaccccctggccattcaactgtaatcgactgcccgaggctgcagacttagaagcatgcgcccagccc

SEQ ID NO: 4685 - DNA, 231 bp, Homo Sapiens
tatgaatcccacgaaagtatggagtcctacgagttgaacccatttatcaaccgaaggaacgccaataccttcatttctccacagcagagatggcgggccaaggtccaggagcgcatacgcgaacggagcaagccagtccatgaactgaacagagaagcttgtgacgactatcgcttgtgcgaaaggtacgcaatggtgtatggatataatgctgcgtacaatcgctacttc

SEQ ID NO: 4686 - DNA, 1173 bp, Homo Sapiens
ttcgtgctgtctggtggaaggtgggaaaagacagacctgacctaccgcatcctgcgcttcccatggcagctggtgcaggaacaagtcagacagacgatggctgaagccctgaaggtctggagcgacgttacgccactgactttcaccgaggtgcatgagggtagagctgatatcatgattgactttgctagatactggcacggagacgacctgcccttcgacgggcccggtggcattttggcacacgcctttttcccaaaaactcacagggagggagacgtacactttgattatgacgagacatggaccattggtgatgatcaagggaccgacctgctgcaggtagccgcccacgagtttgggcatgttctgggtctgcagcacaccaccgccgcaaaagctttgatgagtgcgttctacacttttcggtacccactgtccctgagccccgatgactgtaggggggtgcagcacctctacggccaaccctggcccacagtgaccagtcgcacaccagccctgggcccacaagcgggcatcgacacgaacgaaatcgctccactggagccagacgcccccccagatgcctgtgaagctagcttcgacgcagtgagtaccatccgaggcgagctgttcttctttaaggccggctttgtgtggcggcttcggggaggccagctgcaacccggctacccagccctggccagccgacactggcagggcctgccttcccctgtggacgcagctttcgaggatgctcaagggcacatctggttctttcagggagcacagtactgggtctatgatggggagaagccggtgctgggtccggctccgctcaccgagttggggctggtgaggtttcctgtacacgctgctctggtctggggacccgaaaagaataagatctacttctttcgcggaagagactattggcggtttcacccaagcacccgacgagtggattcaccggtaccacggagagccaccgactggcggggggtgccttccgagatcgatgctgcctttcaagacgccgatggatatgcctacttcctgcgcggccgcctgtactggaaattcgatcccgtcaaggtgaaagcactggaaggcttcccaagactggtggggccagattttttcgggtgtgccgaacctgctaacacttttttg

SEQ ID NO: 4687 - DNA, 1275 bp, Homo Sapiens
agccccagggcacccctctccctgagtaggagaggctggcagcctaggggatatcctgatggcggagccgctcaggcgttctctaaacgcacgttatcttggcgcctgctgggagaggcactgagttcccagcttagcgttgccgatcaaagacgaattgtggctcttgcgttccggatgtggagcgaggtgactcctctggactttagagaggatctcgcagcacccggggctgccgtggacataaaactgggattcgggaggggcagacatctgggctgtcctcgagcttttgacggaagtggacaggaattcgcccatgcgtggagactgggggacattcactttgatgacgacgaacatttcacgccgcccacatccgacaccggcatatccctgttaaaggtggcagtgcatgagatcgggcatgtcttgggcctgccacacacctatcgcaccggatctatcatgcagccaaactatataccacaggaacccgcgttcgagcttgattggtccgatcggaaagcaatacaaaagctgtacggcagctgcgaaggttcattcgacacagcattcgactggattaggaaagaaaggaatcagtatggggaagttatggtgcgcttctcaacctatttcttcaggaacagttggtattggttatacgagaatcgtaataataggacccgctacggagatcctattcagatcttgaccggttggcccggaattccaactcataatatcgacgcttttgtgcacatttggacttggaaaagagatgagcggtacttctttcagggtaatcagtactggaggtacgattccgataaggatcaggcactcaccgaagacgagcagggaaagagctatcccaaactgatcagcgaggggttcccggggattccaagtcctttagacactgcattttacgatcgcaggcagaagctgatctacttcttcaaagagagcctggtgtttgctttcgacgtgaaccgcaatagggttctcaatagttaccctaagcgaattactgaggtgtttcccgctgtcatcccacagaatcaccctttccgtaacattgactcagcgtactacagctacgcgtataactctattttcttctttaaaggaaacgcctattggaaagttgtaaatgacaaggataagcagcaaaactcatggctgccggcgaatggactgttcccaaagaaattcatctccgaaaagtggtttgatgtttgcgatgtccacatcagtactttaaacatg

SEQ ID NO: 4688 - DNA, 1296 bp, Homo Sapiens
tacgccctcagcggctctgtctggaaaaagagaacactgacctggcgtgtgaggtcatttccccaaagtagccaactcagtcaagaaacagtcagagtcctgatgagctacgccttaatggcctggggcatggaaagcggactgaccttccacgaggtagactctccacaaggtcaggaacctgacattctgatcgactttgctagagcattccaccaagactcttacccctttgatggcctcggcggcacgttggcccacgcattctttccgggcgaacaccctatctctggcgatactcacttcgacgatgaagaaacatggacattcggctccaaggacggggaagggactgacctgtttgccgtcgctgttcatgagttcggtcacgcgctgggtctcggacattcctcagcgcctaatagcatcatgagacctttctaccagggccccgtgggtgatcccgacaaatatcgactgagtcaggacgacagggacggcctgcagcaactttacggtaaagcccctcaaacgccatatgataagcctaccaggaaaccactcgccccacctcctcaacctccagcatcaccaacccacagccccagtttcccaatccccgatcgatgcgaagggaactttgatgcaatagctaacatccgtggggagacttttttcttcaaggggccctggttctggcgactccagcccagcgggcagcttgtctcacctcgccccgcgcggttgcataggttctgggaaggccttccggcccaagtgcgagtggtacaagcagcatatgctcgccatagagacggtcgtatcctgctcttctctgggcctcagttttgggtttttcaggaccgacaactcgaagggggagcgagacccctcaccgagctgggactgccaccaggagaagaagttgatgcagtgttctcatggcctcagaacgggaagacttaccttgttagaggccgccaatactggcggtacgacgaagctgctgcccgacctgatccaggataccccagggacctgtctctttgggagggagcgcccccatctccagacgatgtgacggtcagcaatgcaggcgacacttacttcttcaagggtgcgcactactggagatttcccaagaacagtatcaaaacagaaccggacgctccacagcctatggggccaaactggctggactgccctgctccgagtagtgggccaagagcaccccgaccccctaaggccacccctgtcagcgagacatgtgattgtcagtgtgaactgaaccaggca

SEQ ID NO: 4689 - DNA, 1449 bp, Homo Sapiens
gtccccctccagagtaatcggctgggtccaacctctcgactgagatacagcagatttctggatccgtccaacgtgatctttttgaggtgggatttcgacctcgaagctgagattatctctttcgaactccaagtccgaaccgcaggttgggtaggattcggagtcacgaacagatatactaatgtggggtcagacctggtggtggggggcgtgttgcccaatggcaatgtgtacttcagtgaccaacatctggtggaggaagacaccctgaaagaggatggcagtcaggacgctgagcttctcggtttgaccgaggacgcggtgtatactacaatgcacttcagccggccattcagaagttgtgatccccatgatctggatataacctctaacactgtaagagtgctggcagcgtatggtttagatgatacactcaagctgtacagagagagaacgttcgtgaaatcaatttttctgttgcaggtggtacatcctgacgatctggacgttcccgaggacactataatccatgacctggagatcactaactttctgattccagaggatgatacgacgtatgcatgcacattcctgcctctgcccatcgtgtcagagaaacatcacatctataagtttgaacctaagctggtctatcacaatgagactacagtacatcatattctggtctacgcctgtggcaacgccagcgtgttgcccacaggcatatcagactgttacggcgccgatccagctttctcactgtgctcccaggtgatcgtggggagcgccgtgggcggcacaagctaccagtttcccgacgacgtgggcgtttccatcgggactccccttgacccacagtggattttggagattcactacagtaatttcaacaatctgccaggcgtgtacgatagcagcggtatccgcgtctactacacgtctcaactgtgtaaatacgacactgacgtcctgcaactcgggtttttcacctttccgattcacttcattccccccggggccgagtcctttatgagctacggtctctgccgcacagaaaagttcgaggaaatgaacggcgccccaatgccagacatccaagtgtacggctacctgctgcacacacacctggccggtagggccctccaggctgtgcaatatcggaatggcactcagcttcgcaagatttgcaaggatgatagctacgatttcaatctgcaggagactagggacctgccaagtcgtgtggagattaagcccggagacgagctgttggtggaatgtcattaccagactctggatcgggacagcatgacttttggcggtccttccaccataaatgaaatgtgcctcatcttcctgttctattatccccaaaataacattagttcttgtatgggctacccggatatcatatacgttgctcatgagctcggagaggaagcaagtgag

SEQ ID NO: 4690 - DNA, 312 bp, Homo Sapiens
agcaaatgctatttccaagcccaagcgccttgccactacgaaggcaagtatttcacattaggagagagctggctcagaaaagactgctttcattgcacatgtctgcacccagtcggagtaggctgttgtgatacctctcaacaccccatagatttccccgccggttgcgaggtacggcaagaagcaggaacatgccaattcagcctcgtgcagaagtccgatcctcgcctcccatgtaaggggggcggacccgatcctgagtggggctctgctaacacgcctgtgcccggcgccccagcccctcacagcagc

SEQ ID NO: 4691 - DNA, 1257 bp, Homo Sapiens
accacttttcaagagtaccaaaagacaggagagctgtcaacctccgaccacatatttccgctcacacctggccttgtttatagcattccctttgatcatattgttctgcactctgggcagaggccgccagaactgcctaagtccactgagattcatgaacagaaaaggcattgtaatactactaggcacagcaaacctactgacaaaccgaccgggaattccaaaactatcgatcacaaaagttcaactgataatcacgaggccccacctacctccgaagagaacagcagcaatcagggtaaggacccaatgatacgtaatcagcggtcagtggacccagccgacagcaccacaacgcataaggaatctgcaggaaaaaagcatattactcctgccccaaaatctaaaatcaactgccgaaaaagcacgactgggaaatctacggtgactcgaaaatccgataagacgggccgacccctggaaaagtccatgtccacattagacaagacgtcaactagtagccataagactacaacctcatttcataactccggaaacagccagactaagcagaaaagcacaagttttcctgagaagatcacagctgcatcaaagacaacatacaaaactaccggcacacccgaagagtcagaaaagaccgaagacagccgcactaccgtggcctcagataagctgctcactaagaccaccaagaatattcaggagaccatctcagccaacgagttaacacaatcactggccgagcctactgagcatggtggcagaacagccaacgagaacaacacccccagcccggcggagcccaccgagaacagggagcggaccgccaacgaaaataagaaaaccatatgcactaaaggtaaaaacaccccggtgcccgaaaagcctacggaaaatctcggaaacaccaccctgaccacagagactatcaaggcacccgttaaatctacggagaatcctgagaaaacagctgcggtcaccaagacaataaagccctctgtgaaagttacaggggataaaagcctgactacaacgtcttcacatctgaacaaaactgaagttactcaccaagtccccacaggaagcttcactcttatcacatcacggactaagctgtcttcaatcacctccgaggcaaccggcaacgagagtcacccttacctcaataaggatggatctcagaaaggaatccacgctggccagatgggcgaaaatgatagctttcctgcttgggcc

SEQ ID NO: 4692 - DNA, 993 bp, Homo Sapiens
tctcctcccgcagccccccgattcaacgtgagcctggactcagttcccgaattgagatggttacccgtgctgcgacactatgacctggatctggtgcgcgcagcaatggctcaggtcatcggggaccgcgtcccgaagtgggtacatgtgctgatcggcaaagtggtcctggagctggagcggttccttccacagccctttacgggcgagatacggggcatgtgtgattttatgaacctgtccttggccgactgtctgttggtaaatttagcctacgaatccagcgtgttctgcacatccattgtggctcaggacagccgtgggcatatctaccacggcaggaacctggactatccattcgggaatgtcttgaggaaacttaccgtggacgttcagtttctgaagaacggccaaattgcctttaccgggacaaccttcatcggatatgtcgggttatggactgggcaatccccacataagttcacagtttccggcgatgagcgcgacaagggctggtggtgggaaaatgccatcgccgctttattccgtagacatattcccgtcagttggctgattagagcgactctgagcgagtccgaaaattttgaggccgccgttggaaagctcgctaaaactcctctgatcgctgatgtgtactatattgtgggaggcacctccccgcgagaaggcgtagtgattacacggaacagagatgggccagctgatatatggccacttgaccccttaaacggggcctggtttagggttgagactaattatgatcactggaaacccgcacctaaggaagatgatcgccggacatccgccatcaaggctttgaacgccaccggtcaagcaaacctgagcttggaagcgctgtttcaaatattaagtgtggtccccgtatacaacaattttactatttacacaacagtgatgtccgcaggcagcccagataagtacatgacaaggatccgcaatccttcaagaaaa

SEQ ID NO: 4693 - DNA, 495 bp, Homo Sapiens
gcagctccccctcccattaataaattggccctttttccagacaaaagtgcatggtgtgaagctaagaacatcactcagatcgtgggacactccggttgcgaagctaaaagtatccagaatagggcatgcctggggcagtgcttcagttactccgtccccaacacttttcctcagtccacagaatcactcgtgcattgcgacagttgcatgccagcccaatccatgtgggaaatagtaaccctggaatgccccggtcatgaagaggtaccgcgagtggacaaactggtggagaaaatccttcactgctcctgccaggcgtgcggcaaggagcccagccatgagggcctgagtgtttacgttcagggtgaagacggaccaggctctcagcccgggacccatccccacccacatcctcatccacacccaggcggccagacccctgaaccagaagacccacctggtgctccacatacagaagaagagggggcagaagac

SEQ ID NO: 4694 - DNA, 966 bp, Homo Sapiens
acaaagaaaggaactgagaagcaaactacaagtgaaactcaaaagtcagtccagtgcggcacatggaccaagcatgcagaaggtggcatctttacgtcccccaattacccaagcaagtatcccccggacagagagtgtatctacatcatcgaagccgcccctcgtcagtgcatcgaactgtattttgacgagaaatactccattgaaccaagctgggaatgcaagtttgaccacattgaggttagagacggcccattcgggtttagccccatcatcggcaggttttgcgggcaacagaaccctcccgtgataaaatcttctggtcgatttctgtggattaaattcttcgccgacggcgagctcgagagtatgggtttttccgcccgctataatttcacgcccgaccctgatttcaaggatttgggagcactgaaacccctgccagcatgtgaattcgaaatggggggctccgagggaattgttgaaagcatccagatcatgaaagagggaaaggctaccgccagcgaagcggtggattgcaaatggtacattagggcccccccacgctccaaaatttaccttaggtttcttgactacgagatgcaaaattccaacgagtgcaaaagaaactttgtggccgtctacgacggatcaagttctgtcgaagatctgaaagctaaattttgtagcaccgttgctaatgacgtcatgctgcgcaccggtctgggcgttatccgtatgtgggcagacgaagggagccggaatagccgcttccaaatgctttttacctcatttcaggagccaccttgtgagggaaatacatttttttgtcactctaacatgtgcatcaacaatactttggtgtgtaatggacttcagaactgtgtgtacccatgggacgagaaccactgcaaagagaaacgcaagaccagcctgctggaccaactgaccaataccagtgggacc

SEQ ID NO: 4695 - DNA, 828 bp, Homo Sapiens
gcagtcacccgctgtggctttgcaactcggggagtggcaggacctggacctatcggccgggagcccgaccctgactcagactgggagccagaagagagagaacttcaggaagtggagagcaccttgaaacggcaaaagcaggcaattaggtttcagaaaattcggcgccagatggaggctccaggcgcgccccctaggacccttacctgggaagccatggagcaaattagatacctgcatgaagagttcccagagtcctggagcgttcctcgcctggccgagggatttgacgtgagcaccgacgtaatcagacgagtccttaagtccaagtttttgcccaccttagaacagaaactgaagcaggatcagaaagtgctgaagaaagccggtctcgctcactctctccagcacctgcgagggtccggtaacacaagcaaactcctccccgcaggccactccgtgtccgggagcctgctgatgcccggacacgaggcgagcagcaaggatcctaaccattctacggctctcaaggtcattgagtccgacacccaccggacaaacaccccacggcgacggaaagggcgcaataaggagatccaggaccttgaagaatcattcgtgcccgtggccgctcccctggggcacccccgcgaacttcagaagtattcctccgatagcgaatctcctcgtggtaccggatccggcgctctgcccagcgggcagaagctggaggagttgaaagctgaggagcccgacaacttttctagcaaggtcgtacagagagggagagagtttttcgactccaatggcaactttctctaccgtatc

SEQ ID NO: 4696 - DNA, 351 bp, Homo Sapiens
atgcctggagatagttcacctggaactttgcctctctgggatgcctcattgagtccacctctgggaccggatcccggggggtttagtagggcatcccatgctggcgacaagtcccgccctcccgctcctgagttgggctctcctggcgctgtgagacccagagtgggatcctgcgcacctggaccgatggaactgcgcgtcagtaacaccagttgcgagaatggtagcctgcttcacctctactgttcatctcaggaagtcttatgtcagatagtcaatgacctttcacccgaagtcccatcaaatgccacgttccactcctggcaagagaggatccggcagaattatggc

SEQ ID NO: 4697 - DNA, 1431 bp, Homo Sapiens
agtgagggacgaaagacctggaggcggcggggacagcagcctcctccacctccacggaccgaggccgcgccagccgccggacagccagtcgaatccttccctctggactttacagccgtggaaggcaatatggacagcttcatggcacaggtcaaatcccttgcacaatcactctacccctgcagcgcccagcagcttaacgaagacctcaggctccacttacttctgaacacatccgtcacttgcaacgacgggagcccggcaggctactatttgaaggagtcacggggtagtagacgctggcttctcttcttagagggcggctggtactgtttcaatcgcgaaaattgtgattcccggtacgacaccatgagacgactgatgtcttccagagattggccgagaacaaggactggtacaggcatactgagcagtcagcctgaagagaatccttattggtggaacgccaacatggtgttcataccctactgttctagcgatgtctggtccggcgccagcagcaagtcagaaaaaaatgaatacgcctttatgggagcccttatcattcaggaggtcgtcagggagctccttggccgtggcttgagcggagcaaaggtgctgttgctggccggatccagcgctgggggcactggtgtgctgctgaacgttgaccgcgtggcagagcagctggagaaactgggctaccctgccattcaggtaagagggctcgcggattctggttggttcctggataataagcagtacaggcatactgactgcgtggataccatcacctgtgcacctacagaagccatcagacgtggaatacgctattggaatggcgtggtgcctgagcggtgtaggaggcagtttcaggagggggaagagtggaactgcttcttcgggtacaaggtgtaccctactcttaggtgccccgtctttgtcgttcagtggctctttgatgaagcacagctcacggtggacaacgttcatcttacaggccagccagtacaggaaggattgaggctgtatatccagaatctgggtcgcgaattaagacacaccctgaaggacgtcccagcgtctttcgcgcctgcgtgcttatcccacgagatcatcataaggagccattggaccgatgtgcaagtcaaaggcacctccctcccccgagcattgcactgctgggatcgttctctgcacgatagtcataaggcatcaaagactcctttgaagggatgtcccgtccacctcgttgattcttgcccctggcctcactgcaaccctagctgcccaacggtgcgggatcagtttactggacaagaaatgaatgtggcacagttcttaatgcacatgggctttgacatgcagactgtggctcagccacagggactggagccttctgaactgctgggtatgctgtccaatggttct

SEQ ID NO: 4698 - DNA, 519 bp, Homo Sapiens
gggcgaattgtgcgtggccagactcaggactccctctctctgcacaacattacattttgcagggaccgttacgccgagtggcagacagttgcgcagtgtcccgttccacagttttcaggcaaagagcctagcgcatggaagtggattctgggccctgtagtcctgtatgcttgcgagcgaattatccgcttctggcgattccaacaggaggtggtgattacaaaggtggttagccatccatccggggtcttagagctgcacatgaagaagaggggttttaagatggctccagggcaatacattctcgttcagtgccctgctatttcctccttggagtggcatccttttacactgactagcgctcctcaggaagattttttctccgtgcacatcagagccgccggggattggactgccgcccttctggaagccttcggagctgagggtcaggccttgcaagagccctggagcttgccgaggctggccgtagatggaccattcggaaccgcactgactgat

SEQ ID NO: 4699 - DNA, 1275 bp, Homo Sapiens
cagcccaccccagtgattaatagcttggccgtctatcgtcaccgtgagactgactttggagtgggagtgcgcgaccatcctggacagcatgggaagacaccgagtccacagaaattagacaacctgataataatcattattggctttctgaggcgggacaccttcaccattctgttttgcacatcttacctgtgcgtttccttcctgaagaccattttctggagccgtaatggacacgatggttccaccgacgtgcaacagcgcgcctggcgctccaacaggagcaggcaaaagggcttgaggtcaatctgcatgcacacaaaaaagagggtgtccagctttcgcggcaataaaatcggactgaaggacgtgattaccctgaggcgccatgtggagaccaaggtgcgggccaaaatccgcaagcggaaggtgacaactaaaatcaatcgacatgacaagatcaacggaaagaggaagactgctaggaagcagaagatgtttcagagggctcaggaactgaggagaagagccgaggattaccataaatgtaagattccccctagcgcgaggaaacctctgtgtaactgggtcaggatggcagcagcagaacaccggcattctagcggtctgccctgctggccatatcttactgccgaggcgctcaaaaatagaatgggtcggcagccgccgcccccaacccaacagcatagcattaccgacaacagtctgtccttgaaaactcctcccgagtgtctgctgcaccctctcccacccagcgtggacgacaacatcaaggagtgcccactcgctcccctccctccaagcgtagacgacaacttgaaggaatacctcctcgtgcccctccccccaagtccactgccaccatccgtggatgataacctgaaggactgcctgttcgtgcctctgccccctagtccactcccacctagcgtggatgacaacctgaaaacacctcctcttgctacccaagaagccgaagcggaaaaacctccaaagccaaagcgctggagggtcgacgaggttgagcagtctccaaagccaaagcgtcgccgggccgacgaggtcgagcagtcccctaagcccaaaagacagcgcgaggctgaagcccaacagttacctaagccgaagcgtcggcgacttagtaagctcagaactcggcattgtacccaggcatgggcaattaggatcaacccgtgggtggagaaaaagaaaaaaatcaagaagcagaacaagacccacgcccccaagaccaac

SEQ ID NO: 4700 - DNA, 1188 bp, Homo Sapiens
caacctacccctgtgattaactccctggccgtatatcgccatcgcgaaactgatttcggagtgggggttagggaccaccccgggcagcacgggaaaactccctctccccaaaagctcgataatttgattatcattataatcggattcctccgtagatatactttcaacgttttgttttgtacttcttgtctctgtgtcagctttctgaaaacaatcttttggagcaggaacggccatgatggcagcatggacgtgcagcagcgcgcatggcgctccaatcgcagccgccagaagggactgagaagcatttgcatgcatacaaaaaagagggtatcatcattccggggcaataagataggactgaaggatgtgatcactcttcgcaggcatgtggaaaccaaggtccgcgccaaaatcaggaaacgtaaggtaaccacaaaaataaacagacacgacaagattaatgggaaaagaaagactgcacgaaaacagaaaatgttccagcgggcgcaagaactccgtcgaagggccgaagattaccataagtgcaagatcccaccaagcgcaagaaagcccctctgtaactgggttaggatggctgccgcagaacattgccactcttccgggctcccatattggctctatctgactgctgagacgttaaaaaatcggatggggcggcagccccctccacccacacagcagcactcaattaccgacaacagtctctctctgaaaaccccccccgaatgccttctgactcctctcccgccaagcgttgacgacaatatcaaagagtgtcccctcgcacccctgcctccatctcctctccctccttctgtggatgataatttaaaggagtgtctttttgtgcccctgcctcccagcccactgccaccatccgttgacgataacttgaaggagtgcctgttcgtgccactgccaccctcaccactcccacctagcgttgatgacaatctgaagacgccgcccctggctacacaggaagcggaggttgagaaaccacctaagcctaaacggtggagagtcgatgaggtagagcagtccccaaagccaaaacgacaacgggaggctgaagcacagcagctcccaaagcccaagcggaggcgattaagcaagttaagaacacggcattgtacacaagcctgggctatccgcatcaaccca

SEQ ID NO: 4701 - DNA, 324 bp, Homo Sapiens
cacccccttggcagtccgggctccgcatcagacctggagacttcaggactccaggagcagaggaaccaccttcagggaaagttatcagaactgcaggtcgagcagaccagcctcgaaccacttcaggagagcccccgcccaacgggagtgtggaagtcccgggaggtcgctaccgagggtatcagagggcatcgcaaaatggtcctctataccctgagagcacctcgctccccgaaaatggtccagggcagcggatgtttcgggcggaaaatggacagaatatcctcctccagtgggcttggctgcaaagtgttacgcagacat

SEQ ID NO: 4702 - DNA, 1365 bp, Homo Sapiens
ggtggtgtcggaggcggcggcggcggcgccggtattggggggggccggcaagagcgcgaggcactcccaccccaaaaaattgaggttctcgtcctcttgccccaagacgacagctaccttttttctttaacacgcgtcagacctgctatcgagtatgcgctccggagcgtggaagggaacggaacaggtagacgactccttccgccaggtactcgttttcaggttgcctatgaggattctgactgcggaaaccgggcactgttcagtctggtcgatcgagtggccgccgcccgcggagcaaaaccggacttgatcttaggaccagtatgcgaatatgcagctgctcccgttgccagactcgccagtcactgggatctgcccatgctttccgctggcgcgctggccgccggcttccaacacaaggatagcgaatatagccacctcacccgagttgctcccgcttatgcaaagatgggcgagatgatgcttgcactgttcaggcatcaccactggagccgcgccgccctcgtgtactcagatgacaagctggagcggaactgttacttcacactggagggcgtgcacgaggtgtttcaggaagagggactgcacacaagcatatactcattcgacgagactaaagatctggacttagaggacatcgtgcggaacatccaagctagcgagcgcgtggtgatcatgtgtgccagttcagataccatccgatccataatgttggtggcccatcggcatggtatgactagcggggactacgctttctttaacatcgaactcttcaactcaagcagttacggcgacggatcctggaaaaggggggacaaacacgactttgaggctaagcaggcatattccagccttcaaaccgtgactttgctccgcacggtcaagccagagtttgagaagttctctatggaggtcaaaagctcagtcgaaaagcagggcctgaatatggaggattacgttaatatgtttgtggagggcttccacgatgcaatcctcctttatgtccttgccctccacgaggtgctgagagctgggtatagtaagaaggacggcgggaagatcatccagcaaacatggaacaggacgtttgaagggattgccggacaggtgtccatcgacgcaaatggggacagatacggagacttctccgtgattgctatgactgacgtggaagcaggcacacaagaagtgataggggactacttcggaaaagaaggcaggttcgagatgcggccaaatgtaaaatacccatggggccccctcaagcttagaatcgacgagaacaggattgtcgaacacacaaattcctctccttgcaaaagcagtggaggcttagaagag

SEQ ID NO: 4703 - DNA, 267 bp, Homo Sapiens
gcaggaaaatgcgacgccgtgttcaagggcttcagtgattgtcttcttaagcttggagatagcatggccaattaccctcagggccttgacgacaagacaaacattaagaccgtatgtacctactgggaggactttcatagttgcaccgtaaccgcactgacagactgccaggagggcgcaaaagacatgtgggacaagttgcggaaggagtctaagaacctgaatattcagggctctctgtttgaactgtgcggttctggcaatgga

SEQ ID NO: 4704 - DNA, 306 bp, Homo Sapiens
gctcgcctgggcgctaggccttgtgggctgcgggagctggaggtacgcgtgtccgagcttggactgggctatgcaagcgacgaaacggtcttgtttcgctactgtgcaggagcctgcgaggccgccgctagggtttacgacctcggccttagacggctgagacagagacggcggctgcggcgggagcgggttcgcgcccagccctgttgcagacctaccgcttatgaggatgaggtgagttttctggacgctcattctaggtaccacactgtgcacgaactgtccgctcgagagtgtgcctgcgtc

SEQ ID NO: 4705 - DNA, 1305 bp, Homo Sapiens
gtcccccttgagcgtggggccccgaacaaggaggaaacacctgctaccgagtctcctgatactggtctctattatcaccgctacctccaggaggtgattgatgttctggagaccgacggacactttcgggaaaagctgcaggctgcaaatgccgaggacattaaatccgggaagctgagcagagagctggacttcgtaagtcatcatgtaaggactaagctcgacgagctcaagcgacaggaagtcagccgccttcgcatgttactgaaagcaaagatggacgccgaacaagaccccaacgttcaagtggatcacctcaatttactcaagcaattcgagcacttggacccacagaaccagcacacgttcgaggcacgagatttagaacttcttatccagaccgccacgagagacctcgcccagtatgatgccgcccatcacgaggagtttaagcgctacgagatgcttaaggaacacgaacggaggcgatacctggaatctttgggcgaggaacaacgtaaagaggctgagagaaaactggaagaacagcagaggcgccatagagaacaccctaaggtgaatgttccagggtctcaggctcagctcaaggaggtgtgggaggaactggatggattggatccgaacaggttcaatcccaagacattctttatacttcatgatatcaattccgacggcgttctcgatgaacaggaactcgaggctttattcaccaaagagctggagaaggtgtatgacccaaagaacgaggaggacgacatgagagagatggaggaggaacgcctgcggatgagagagcacgtgatgaaaaacgtcgatacaaaccaggaccggcttgtgactctcgaggaattcttggcctccacccagagaaaggagttcggcgataccggagagggctgggaaacagtggaaatgcacccagcatacaccgaggaggagttgcgcagatttgaggaagagctcgcagcccgggaagccgaactcaatgcgaaagcccagcggctgtcccaggagacagaggcattaggacgctctcaggggagacttgaggcacagaagcgagagctgcagcaggctgtgctccacatggaacagcggaaacagcagcagcaacagcagcaagggcacaaggcccctgcagcccatccagaaggacagttgaagttccatccggataccgacgacgtgccggtgcccgcccctgcgggtgaccaaaaggaggttgatacctctgagaagaagctgctggaacgcctccccgaggtcgaggtgccccagcacctt

SEQ ID NO: 4706 - DNA, 1188 bp, Homo Sapiens
gtccctattgatattgataaaacgaaggtccaaaatatccacccagtcgaatccgcgaaaattgagcccccagatacaggcttatattacgacgaatacctgaagcaagtcatcgacgtgttagagacagataaacatttcagggaaaagctccagaaagccgacatcgaggaaataaagtccggacggttaagtaaggagctggaccttgtatcccaccacgttcgcacaaagcttgatgagctcaagcgccaggaagtgggacgcctgcgcatgctcatcaaagccaagctggattccctgcaggacatcggcatggatcaccaggcccttctcaagcagtttgatcatctgaaccatctgaacccagacaagttcgaaagcaccgatcttgacatgctcatcaaagctgccacttctgatctggaacattatgataaaaccaggcacgaggaatttaagaaatatgagatgatgaaagagcacgagaggcgggaatatctgaagaccctgaacgaagagaagaggaaggaagaagagtcaaagtttgaggaaatgaaaaagaagcacgagaatcacccaaaggtgaaccaccctgggtcaaaagaccagttgaaggaggtgtgggaagagaccgatggcttggacccaaacgactttgatccaaagaccttttttaaattgcacgatgtgaattctgacgggttcctggatgaacaggagctcgaggccctctttacaaaagagcttgagaaagtctatgaccccaagaacgaggaagatgatatggtggagatggaggaagagcggctccgcatgagggagcatgtcatgaacgaggtggacaccaacaaggacaggcttgtcacacttgaggagttcttgaaagccaccgagaagaaggagtttctcgaacctgattcctgggaaacccttgaccagcagcaattttttacagaagaggaacttaaggagtatgaaaatattatcgctcttcaggaaaatgagctgaaaaagaaggccgatgagctgcaaaaacagaaagaggagctgcagcggcagcatgaccagttggaggcgcagaagcttgagtaccaccaggtaattcaacagatggagcagaagaaattacagcagggcatcccaccaagcgggccagctggcgaattaaagtttgagccacatatc

SEQ ID NO: 4707 - DNA, 1200 bp, Homo Sapiens
atgatggatttacgcaatactccggccaaatcactggacaaattcatcgaggattaccttttgcctgacacatgttttcgcatgcaaattaatcatgccatcgacattatctgcggcttcctgaaagaacgttgtttcagagggagctcctaccccgtgtgtgtatcaaaggtcgtcaagggaggctcatcagggaaaggcactacactgaggggtaggagcgacgctgacctcgtggtgttcctgagtccacttaccacattccaggatcagctgaataggaggggagaatttattcaggagatccgtcgccagctcgaggcttgtcaacgcgaacgtgctttcagcgtaaaatttgaagtgcaagcccctaggtggggtaaccctagggcgctgtccttcgtgttgagctccctgcaattgggggaaggtgtggaattcgacgtgctgcccgctttcgacgcactgggtcagctcacaggaggctataagcccaatccacagatatacgttaagctcatcgaggaatgcacggatttgcagaaggaaggcgaatttagcacttgttttactgagctgcaaagagactttctgaagcaaaggcccaccaaactgaagtccctgatcagacttgttaaacattggtatcagaactgcaaaaaaaagctgggcaaattacctccccagtacgctctggaactgctgaccgtgtatgcttgggagcgcggctccatgaagacccactttaacaccgctcagggattccgcacagtgctggagctggtgatcaattatcagcagctgtgcatctactggaccaagtattacgacttcaaaaatcccatcatcgaaaagtaccttaggcgccaattgaccaagccaaggcctgtaatactcgacccagccgatcccactggtaacttgggtggaggggacccaaagggctggcgtcagctcgcacaggaagcagaggcttggttaaactacccttgcttcaagaattgggatggcagtccagtcagcagttggattcttctcgccgagtccaactccgctgatgacgaaacagacgacccgagaagatatcagaaatatgggtatatcggcacacacgagtatccacacttcagccaccgccctagtactttgcaggccgcttctacaccacaggccgaagaagattggacatgcactattctg

SEQ ID NO: 4708 - DNA, 465 bp, Homo Sapiens
ttgtcatttacgcttgaagaagaggatattactggtacatggtatgtgaaggctatggtggtcgacaaggactttcccgaagacaggcggcctaggaaagtgtccccggttaaagtgacggccctcggaggaggtaacttggaggctacctttacttttatgcgtgaagatcggtgcatccaaaagaagatcctgatgcgcaaaacagaagagcccggcaagttctctgcctacggcggacgcaagctgatctatctgcaagaacttcccggtacagacgattacgtgttctattgtaaagatcagcgccggggaggcttacggtacatgggaaagctggtggggcggaatcctaacacaaatctggaagccctggaggagtttaaaaaattggtccagcataaaggactgtccgaagaggatatctttatgcctttgcagaccgggagctgcgtcctggagcac

SEQ ID NO: 4709 - DNA, 1380 bp, Homo Sapiens
catccactcgacacaccacatctcccccaggaactccctcccggcctccctaacaatatcaacataacattctttagtgggatgttcaagaatgtcgaatctgtagctgaaatcttcgattgccttggaccacactttacttggcttcaagctgtcttcacaaactttcctgtactgatccaatttgtaaatggcatgaagtgtgtggccggcttatgtccaagggacttcgaggactatgggtgcacctgtaggttcgagatggaaggcctccctgtggacgagtctgattcttgctgttttcaacacaggcggtgctatgaggaggcagctgaaatggattgcctccaggaccctgcaaagcttagtacagaggttaactgcgtgagtaagaaaattatctgcgagagcaaggataactgcgagcacctgttgtgcacctgcgataaagcagccatcgagtgcctggcccggtcatcacttaattccagcctgaatctgctggatacttccttttgtctggcccaaacccctgaaacaaccataaaggaggatctcactacacttttgccgcgggtggtgcccgtcgagcccaccgataccagcctgaccgccctctctggagaagaagctgggcacgatcaggagggagtaggggccgcccgcgccacgtcccctcctggcagcgccgagatcgtggcaacacgcgttaccgcgaagattgttaccctcgtgccagctggaatcaagtcactgggccttgccgtgtcctcagtcgaaaatgatcctgaagaaactaccgagaaggcctgcgacagatttacatttctgcacctgggatcaggggataatatgcaagtgatgcctcagctgggagaaatgctgttctgtctgactagccggtgtcctgaggaatttgagtcttatggctgctactgcggccaagagggcagaggagagcctagggacgacctggatcgatgctgtctttcacaccattgctgtcttgaacaggtgaggcgactgggctgtctcctggaaaggctcccttggtcaccggtcgtctgtgtcgatcatactcccaagtgcggaggacaaagtctgtgcgaaaagctgctgtgcgcatgcgaccagacagccgctgaatgcatgacctccgcttcttttaatcagagcttgaagagtccctccagactgggctgtcctggtcaacccgcggcttgtgaggacagcctgcaccctgtgccagcagcacctactctggggagcagcagtgaggaggattcagaggaggacccccctcaggaggatctgggtcgcgccaagcgcttcttgcgcaagagtttagggccgctggggatcgggccactgcatggccga

SEQ ID NO: 4710 - DNA, 792 bp, Homo Sapiens
gctccactcatccctcagcgtcttatgtctgcttctaatagcaatgagttgctcctgaacctgaataacggacagctgcttcctctgcagctccagggcccactgaactcttggattcctccattcagcggtatcctccagcaacagcagcaggctcagatcccaggcctgagccagttttccctcagtgcgctcgaccagttcgccggcctgttgcccaaccaaataccactgacaggagaagcatcctttgcgcaaggcgcccaggccggccaggttgatcccctgcagcttcagactcctcctcagacccagccaggtccttcccatgtcatgccatatgtgttttctttcaaaatgccccaggagcaggggcagatgttccagtactaccccgtctacatggtcctcccttgggagcagcctcagcaaacagtgccccgaagtccccagcagacccgccagcagcagtatgaggagcagatcccgttttacgcccagttcgggtacatcccccagcttgcagaacccgcaatatcaggaggccaacagcagctggccttcgatcctcagctgggaacagcccctgagatcgccgtcatgtccaccggggaagaaataccgtatttacagaaggaagctattaacttccgccatgacagcgcaggtgtgttcatgccaagcaccagtcctaagccttcaacaacgaacgtcttcacgagcgcagtcgaccagaccattacccccgaattgcctgaggaaaaggataagactgacagcctgagagaaccg

SEQ ID NO: 4711 - DNA, 321 bp, Homo Sapiens
caggaagaggtttttacccctccgggagactcccagaataacgccgacgcgacagattgccagatcttcacactcacaccacctcccgcacctcggagtcccgtgactagggcccagcctattaccaaaacaccaagatgcccatttcattttttcccaaggcggccgcgcatccactttcggttccctaatcggccatttgtgccttcccggtgcaatcaccggttccctttccagccattttactggccccacagatacttaacatatagatactttccacggcgcagacttcaacgaggctcctcatctgaggagtcc

SEQ ID NO: 4712 - DNA, 291 bp, Homo Sapiens
atccaagtacactgtacacagttttggttcttcgcacgaattaagccaacaatcttttataacctgtacgttaaccctgatgaggtttttctcggtgatggctgtcatgtaacacacgttctgccaaacgtatattacgaatttttttaccacccacacgattgcggcattgttacacagcctttacaggaagtgctgcttctcaaaacaaagattcgctacatcagtcgagattccacagtcaggtcagagatgccactgagctgcgtggtacacaaacagaagtgccag

SEQ ID NO: 4713 - DNA, 423 bp, Homo Sapiens
gagaatctgcacgtgaagatttcctgttcactcgattggctgatggtttccgtgatacccgtggcggaaagccgaaacctctacatcttcgcagacgagctgcatcttggcatgggatgtcctgcgaaccggattcacacatacgtctacgaatttatatatttggtcagagattgtggaattaggacaagggttgtgtcagaagagactttgttgttccaaacagaactgtactttactccccggaacattgaccatgacccgcaggaaatccaccttgaatgcagcacaagcaggaagagtgtgtggctcacccccgtgtcaacagaaaatgaaatcaaattggacccgtctcccttcatcgcagacttccagacaactgcagaggaactcggactgctctcatcaagtccaaatctcctt

SEQ ID NO: 4714 - DNA, 1362 bp, Homo Sapiens
aagacaacaccccacacaaagttcactaaaaagtccgaggagcgcgaaatgcctaaaggactgaaaccttcctctggccctcctccagaggaggaagagaccctgttcacagagatggctgaaatggccgagcctatcacgaagccctctgccctcgacagcgtcttcggcacggccactctcagcccctttgaaaattttactctggaccccgcagactttttcctgaactgctgtgactgctgttcccccgtgcctggtcaaaagggtgagcccggggaaactggccagcctggtcccaaaggggaagccggtaatctgggaatcccaggtccgcccggtgtggtcgggcctcaagggccccgagggtacaagggagagaagggactgaaaggggagaggggtgaccagggcgtgcccggttacccaggtaaacccggagcgcaaggagaaccagggccaaagggtgataaaggcaatattggcctgggtggagtcaagggccaaaaaggctccaaaggcgatacctgcggaaattgtacaaaaggagagaagggggaccagggcgccatggggtcccccggtcttcatggtggtccaggagctaagggggagaaaggtgaaatgggggagaagggcgagatgggagacaaggggtgttgtggagattctggagagaggggcggaaaggggcagaaaggagaaggcggtatgaagggtgagaaaggtagcaagggcgattcaggtatggaggggaagtccggaagaaatggcctgcctggagccaaaggtgaccccggaattaaaggagaaaaaggggagctgggaccacccgggttattgggccccaccggtccgaagggtgacattggtaataagggggtgcgcggtcctacggggaagaagggatcccgcggctttaaagggtctaaaggggaactggccagggtgcctaggtccgctttcagcgctggtttgagtaagccctttcctccccctaacatcccaattaaatttgaaaagatcttatacaacgatcaaggaaattactccccagtgacgggcaagtttaattgcagcatacccggaacatacgttttctcataccacattacagtccgtggtagacccgcaagaatctcactggtcgcccagaacaagaaacagtttaagtcccgcgagaccctgtatggccaagaaatcgatcaggcctccctccttgtgatactgaaactgtccgcgggagaccaggtgtggctcgaagtgtcaaaagactggaatggcgtgtacgtgagtgccgaggacgattccatctttactggtttcctgctctatcctgaggaaactagtgggatctctcca

SEQ ID NO: 4715 - DNA, 204 bp, Homo Sapiens
aagcccgtgcaggaggaaggcgatccttacgccgagctcccagccatgccctactggcctttcagcacaagcgacttctggaattacgtgcagcatttccaggctttaggagcctaccctcagatcgaagatatggctcggactttctttgcgcactttccattgggaagcaccttggggtttcatgttccgtatcaggaagac

SEQ ID NO: 4716 - DNA, 1539 bp, Homo Sapiens
attctcggtggctcccaggttgaaaagggctcttatccttggcaggtaagcttgaaacagaggcagaaacatatctgtggcgggagcatagtgagcccccagtgggtgattactgcagcacactgcatcgctaatcgcaacatcgtatccaccctgaatgttaccgccggggaatacgatctctcccaaaccgaccctggagagcagacactgactatcgagacggtgattattcatcctcatttttccactaaaaagccaatggactacgacatcgcgctgttgaagatggccggcgctttccagtttgggcactttgtggggccgatctgcttgccggagttaagagaacagttcgaggctggattcatctgtactactgctgggtggggccgcttaaccgagggtggggttctgagccaggtacttcaggaagtaaatcttcctatcctgacttgggaggagtgcgtcgccgcattgctgactctgaaacggcccatcagcggtaaaacattcttatgcaccggttttcctgacggcggcagggacgcgtgtcaaggcgacagtggggggtctctcatgtgtcgcaacaagaagggcgcatggacccttgcaggggtgacgagttggggactgggttgcggtagaggttggcgcaacaacgttagaaaatcagatcagggctcccccggcatatttactgatatcagcaaggtgctcccttggattcatgaacatatacaaactgggaacagaagaaagtcaagccgggcttggtgctctgagcaagatgttatcgtcagcggcgccgaaggaaaactgcactttcccgagagtttgcatctttattacgagagcaagcagcggtgcgtgtggaccttattagtcccagaggagatgcatgtcctgctgagtttctcccacttggacgtggagtcttgccatcacagctacctttctatgtattccctggaagacaggccaatcggcaaattctgtggcgagtctcttccatcttctatcttaatcggtagcaatagtttgagactcaagttcgtgtctgatgctaccgataatgccgccagatttaacttgacttacaaagccctcaaacccaactatattcctgacagcgggtgctcctatctcaccgttctgttcgaggaagggcttattcagagcctcaactatcccgaaaattattcagacaaggcgaactgcgactggatcttccaggcttcaaagcaccacctcatcaagctgagcttccaatccctcgagattgaggaatctggggattgcactagcgactacgtgacagtccacagcgacgtggagcggaaaaaagagatagccagactgtgtgggtacgatgtgcccactcctgtcctgagcccatcatccatcatgcttatctcatttcacagtgatgaaaacgggacttgccgaggctttcaggctaccgtgtcttttatccccaaggcgggtaaaaaaatcgaattaccaaccctgtggtttcctgttctgattctggtcatg

SEQ ID NO: 4717 - DNA, 822 bp, Homo Sapiens
cagaaatcttaccaggagagcgaaacaggaccagagtctagtatcattacgaaagttaaggggataacaactagtgaacacaaggtgtgggacgtagaggaatatgtgaagccaccagaagggggttccgtattctccatcataacacgcgttgaggccacccattcccaaacacaaggaacttgtcctgaaagcattagggttcacaacgcaacctgtctgtccgatgccgactgcgtggctggggagctcgatatgctcggaaatggtctgcgtaccgggaggtgcgttccttactaccaaggaccatctaagacttgtgaggtgtttggctggtgccctgtagaggacggcgctagtgttagccagtttctggggacaatggctcctaacttcactattcttataaaaaacagtatacactaccctaagttccatttttctaaagggaacatcgccgaccggacagacggatacctgaaaagatgcaccttccacgaagcaagcgacctctactgcccaatatttaagctcggcttcatcgtggaaaaggctggggaatcttttaccgagctcgctcataaggggggcgtcatcggcgtcattatcaattgggactgcgatttagacttacccgccagcgaatgtaacccaaagtacagctttcgccgcctggacccaaagcatgtgccggcctcatctgggtataattttaggttcgctaagtactataagattaatggtactacgacccggaccttgatcaaggcctacggaattcgcatagacgtgatcgtgcatggccaggctgggaagttttcc

SEQ ID NO: 4718 - DNA, 1416 bp, Homo Sapiens
gacgcacctcctgggaagatcgccgttgtgggcgcaggtattggaggcagcgccgtcgcacattttctgcagcagcacttcggcccgcgagtgcagattgatgtgtacgaaaaaggtacagtcggcggtcggctggccaccatttcagtcaataaacagcactatgaatctggagcagcatcttttcacagcctctccttgcacatgcaggatttcgtcaagcttcttggcctcaggcatcgacgagaagtcgtcggacgcagcgcaatctttggcggcgaacattttatgttggaagagacagattggtacttgctcaatctttttcgcctctggtggcactatggtatctcttttttaaggctgcaaatgtgggtggaagaggtaatggagaagtttatgagaatctacaaataccaagctcacgggtacgccttctcaggagttgaagaactcctgtactcccttggagaatcaacttttgtgaacatgacccagcactccgtcgcggagtcactcctgcaggtaggcgtgacacagagatttatagatgatgtggtgtccgctgtgctgagagccagctacgggcagtctgctgccatgcctgcattcgccggggccatgtctctggcgggggcccagggatctttgtggtcagtggaggggggaaacaaactggtgtgctcaggattactcaaattgacaaaagcgaacgtgatccatgctactgtgaccagcgtcactcttcatagcactgaagggaaggccttgtaccaagtggcgtatgagaacgaggtcggaaattcctctgacttctacgacatcgtagtgattgccacaccgctgcacctcgataattcttcttccaacctgacattcgcaggcttccatcctccaatagatgatgtccaaggaagttttcagcccactgtcgtatctctggtgcacggatacctgaattcatcctacttcggattcccggaccctaaattgttcccctttgccaacattctcactactgattttccatcctttttctgcaccttagacaacatttgtcccgtgaatatttccgcgagcttcagaaggaaacagccgcaggaggcagcagtctggagagtccagtctcccaagccgctgttccggactcagctgaaaacacttttccggagctattactcagttcagacggctgagtggcaggcacaccccctgtacggaagccgtcccaccctccccaggtttgcactccatgatcagcttttctatttgaacgccctggagtgggccgctagcagcgtcgaagtgatggcggttgccgctaagaatgttgctctgttagcctataaccgatggtatcaggatttagataaaatagaccagaaggacctcatgcataaagtcaaaaccgagctc

SEQ ID NO: 4719 - DNA, 1263 bp, Homo Sapiens
ctgtattccagttcagacgacgtgatcgagctgacacctagtaactttaatcgagaagtgattcagtctgattccctttggctggtcgagttctacgccccatggtgcggccattgccagcgtctgacgcctgaatggaagaaagctgcgactgcactgaaggacgtggttaaagtgggggcggtagacgctgacaagcatcatagcctggggggccagtatggagtccagggcttccccacaatcaaaatctttggatccaataaaaaccgcccagaggattatcaaggcggcaggaccggagaggccatcgtagacgccgccctttcagcactgaggcagctggtgaaggaccgcctgggcggaagaagcggggggtactcttccggtaaacaaggacgatcagacagcagctctaaaaaggatgtgattgagttgactgacgactcttttgacaagaatgtccttgactcagaggatgtgtggatggtggagttctacgctccctggtgcggacactgcaaaaatttggaacccgaatgggccgcagcagcttctgaagtaaaggagcaaaccaagggaaaggtaaagctggcagctgtggacgctacagttaaccaggtattagctagccggtacggcattagaggcttccctaccatcaagatttttcagaagggagagtcccccgttgactacgatggtggtcggacaaggtctgatatcgtcagccgggccctcgatttattcagtgacaacgcccctccacctgaactgcttgagattatcaatgaggacattgctaaacgaacctgtgaagaacatcagttatgtgtggtggcagtgttgccccacatcctcgataccggggcagcaggtagaaattcatatcttgaggtcctgttaaaactggccgataaatacaagaaaaaaatgtgggggtggctgtggaccgaggcaggcgcccagtccgaactcgagaccgctctggggataggagggtttggctacccggccatggctgcgattaatgcccgcaagatgaaattcgcccttctgaaggggtctttcagcgagcagggtatcaacgagtttctgcgggagttaagttttgggcgagggtctactgctcccgttggagggggggcgtttccaacaatcgttgaacgggaaccctgggacggacgagatggagaactgcctgtggaggatgatatcgatttgtctgatgtggaactggacgacctgggtaaggacgaactg

SEQ ID NO: 4720 - DNA, 615 bp, Homo Sapiens
gacgaggacgaaaacagtccttgtgctcacgaagctttgctggatgaggatacactcttttgccagggcctcgaggtgttctacccggaattgggcaatattggctgtaaggtggtcccggattgcaataactacaggcagaaaatcacaagctggatggagccaatcgttaaatttcccggggccgtggacggggctacctacatcctcgtcatggtggaccccgacgcaccttcacgcgccgagccacggcaaagattttggcgccactggctggtgaccgatatcaaaggcgcggacttgaagaagggaaaaattcagggacaggagttatctgcctatcaggccccgagtccccccgcgcatagtggttttcacagataccaattcttcgtctatttgcaagagggcaaggtcatcagtctcctgccaaaggagaacaagacacgaggtagttggaagatggaccggttcctgaaccgttttcatctgggcgagccagaggcgtccactcagtttatgacccagaactaccaggactcacccactctgcaggccccacgggagcgcgcatccgagccaaagcataagaaccaagccgaaatcgccgcttgt

SEQ ID NO: 4721 - DNA, 978 bp, Homo Sapiens
gttgacgaacagccactcgagaactatctggatatggaatatttcggcacgattggaatcggcacaccggcacaggatttcacagttgtgttcgatacgggctccagcaacctttgggtccctagtgtgtactgctctagcctggcatgcacaaaccacaaccggttcaacccagaggattcaagcacgtaccagtctacttcagagacagtatcaatcacctatggcacgggtagcatgactggtattctggggtatgacacagttcaggtggggggcatttcagacacgaatcagatattcgggctctctgagaccgaacctggaagtttcctgtattacgccccgtttgatggcatccttggcctggcctacccgtctatcagctcaagcggcgctacaccagttttcgacaacatttggaatcaggggctcgtgtcacaggatcttttctctgtgtatctttcagccgatgaccaatctggatccgtggtcatcttcggggggatagacagttcctactacacagggagtctcaactgggttcctgtcaccgtggagggatactggcagataaccgtggactctattactatgaatggcgaggctattgcatgtgccgaggggtgccaggctatagtggatactggtacaagcttgttgacgggacctacaagtcccattgcaaacattcaaagtgacataggggccagtgagaattctgatggggacatggttgtgtcctgttcagccataagcagcctgcctgacatcgttttcacgattaacggcgtccagtatcccgtgcccccttccgcctacatcctgcagtcagagggttcatgcatctctgggtttcaggggatgaacctgcccactgaatccggggagctctggatcctcggcgatgtgtttataagacagtattttaccgtcttcgaccgcgccaacaatcaggtagggctggccccggtggct

SEQ ID NO: 4722 - DNA, 987 bp, Homo Sapiens
agcgtaacatacgaacctatggcatatatggatgcagcttatttcggagagataagtattggcacccctcctcaaaacttcctcgttctgttcgatactggttctagtaatctgtgggtgccgtctgtttattgtcagtcacaggcgtgtacaagccactcccgtttcaacccatctgagtctagcacatactctactaatggtcagacttttagcctgcagtacggctccgggtctttgaccgggttcttcggatatgataccctcaccgttcagagcattcaggttccgaatcaggagtttgggttaagcgaaaacgaacccggaacaaatttcgtgtatgcacaattcgacggtatcatgggtctggcgtatccagccctttcagtagatgaagcaaccacggcgatgcagggtatggtccaagaaggcgctctgacatcacccgtgttttccgtctatctttcaaaccagcagggctcttccggtggtgccgtggtattcggaggagtagacagctccttatatacaggccagatatattgggcaccagtgacccaagagctctattggcagattgggatcgaagaattcctgattgggggtcaggcaagcggctggtgtagcgaaggttgtcaggccatcgtcgacaccggaacatccctgctgaccgttccacagcagtacatgagcgctttactgcaagcaactggcgcgcaggaggacgagtacggacagtttctggtgaattgtaattccatccagaacttacctagtctgacgttcataatcaacggagtggagtttcctctgcctcccagttcttatattttatccaataatggatactgcaccgtgggtgtcgagccgacctacctttcttctcagaacggtcagcctctgtggattcttggggacgtcttcctccgaagctactacagtgtgtatgatttgggtaacaacagagtgggctttgccactgctgcc

SEQ ID NO: 4723 - DNA, 1665 bp, Homo Sapiens
tcactccccctgctcatggacagcgtgattcaggcgctggccgaattggagcagaaagtgccagccgcaaagacgagacacaccgccagcgcctggttgatgagtgctccaaacagtggtccacacaatcggctctatcatttcctgctcggtgcatggtcattaaacgctaccgagctggacccttgccctctgagcccagagctgctggggctgaccaaggaagtggcacgccatgatgtccgggaggggaaggagtatggagtggtgctggcaccagacggtagtaccgtggccgtggagccccttctggccggcttagaggccggcctgcagggccggcgtgtgatcaatctgccactggatagtatggcggctccatgggagactggagatacctttcctgacgtggtggcaattgctccggacgttagggctacgtcaagcccgggacttagagatggcagcccagatgtaacaactgctgacatcggggcaaatacacccgatgctacgaaaggctgtccggacgtacaggcctctctccccgacgccaaggctaagtccccacctaccatggtcgactccttgctggctgtaacactggccgggaacctgggcctgaccttcctgagggggtctcagactcagtcacaccccgacctgggaactgaggggtgttgggaccaattgtcagctcctagaacatttactcttcttgacccaaaggcctctctcctcaccatggccttccttaacggagcacttgatggggtaatactgggcgattacctgtcacggacaccggagccccgccctagcctgagtcacttgctgtcccaatattacggagctggcgtcgctcgagatcccggctttcggagcaatttccgcaggcagaacggcgccgcactcaccagtgcttctatccttgcccagcaggtatgggggacactggtgctccttcagcggttagaaccagtccatctccagctccaatgcatgtctcaggagcaactggctcaggtggccgcaaatgcaactaaggaatttacagaagcatttctcggatgcccggccatccatccaaggtgtaggtggggagcagcaccctatagagggcgacccaagcttctgcagctgccgctcggttttctgtatgtgcatcacacttacgtcccagccccgccatgtactgatttcactcgttgtgcagccaatatgcggtcaatgcagcgttatcatcaggacactcaaggatggggcgacatcggttacagctttgtggtgggcagcgacggatacgtttatgaaggacgagggtggcactgggtgggcgcccatacccttggacataactcccgcgggtttggagtggcaattgtgggaaactatactgctgccctgccgaccgaggcagcactgcgtactgttagagacacattaccatcttgtgccgtgagggcgggcctgttgaggccagattatgcattgctggggcataggcagctggtgagaacagattgcccaggggatgcactgttcgatcttctgagaacatggccccattttacagccacggtcaaaccgcggcccgcgagaagcgtaagcaagaggtcaaggcgggaaccccctcccagaacccttcccgcaacggacctgcag

SEQ ID NO: 4724 - DNA, 1068 bp, Homo Sapiens
gactcatcttggaacaagacacaggcaaagcaggtgagtgagggccttcagtacctttttgaaaacatctcccagcttaccgaaaaggggttgccaaccgacgtttcaaccaccgtgagtagaaaggcctggggagctgaagctgtaggatgcagcattcagctgaccacgccagtaaatgttctggtcattcatcatgtgcctgggcttgaatgccacgaccaaaccgtttgttcccaacgattgcgagaactgcaagcccaccacgttcacaataatagtgggtgcgatgtcgcatacaacttcctcgtgggcgacgacggtcgcgtgtacgagggggtgggatggaatattcagggagtgcacactcagggctacaataacattagcttgggcttcgcatttttcggcacaaaaaaagggcacagtcctagtcccgcagccttatcagccatggaaaatctcattacatatgccgtacaaaagggccacctttccagttcctacgtccagcctcttctgggcaagggagagaactgtttagcccccaggcagaaaacttctttgaaaaaggcctgcccaggggtcgtgccgcgctccgtctggggagcccgggagacccattgcccccgcatgacactgccagcaaagtacgggattatcatccataccgccggcaggacttgcaatatttctgacgaatgccggttgctggtgcgcgacatccagtccttctacatcgaccgactgaagtcatgtgacattgggtataatttcttggttggacaggatggggctatctacgagggggtgggttggaacgtccagggctcaagtacaccaggatacgacgatattgcacttggcatcacgtttatgggcacttttacaggcattcctcccaacgcagctgctctggaagcagctcaagacttgatacagtgcgcaatggtgaaaggttatctgacccctaactacctgctcgtggggcactctgacgtggcccggacacttagtccaggccaggcactgtataatattatctctacatggcctcatttcaaacac

SEQ ID NO: 4725 - DNA, 1308 bp, Homo Sapiens
ttgactgatgaggagaaaaggctgatggtcgagcttcataacctttaccgtgcccaggttagcccgactgcatccgacatgttacatatgagatgggacgaggagctggcagctttcgcaaaggcatatgcacgccagtgcgtctggggtcataacaaagagagaggacgccggggggagaacctcttcgctatcaccgatgagggcatggacgtgcccctggccatggaggagtggcatcacgagcgagagcattataacctgtctgccgctacatgcagcccaggtcagatgtgtggacactacacgcaggtcgtgtgggccaagacagagcgtatcggctgtggatcacacttttgcgaaaagctccaaggcgtggaggaaacaaacattgaattgcttgtgtgtaattatgagcctcctgggaatgtgaagggcaagcggccttaccaggaaggcactccatgtagtcagtgtccctccgggtaccattgcaagaacagtctttgtgagccaattggctcacctgaagatgctcaggacctcccatacctggttacagaagctcctagcttcagagctaccgaagcttctgacagtcgaaagatggggaccccctctagtcttgccacaggcattcccgccttcctggtgaccgaagtgtctggcagtctggccaccaaggctctgcccgctgttgagacccaagctcctacctctctcgctacgaaagacccaccctcaatggccaccgaggccccaccctgtgttaccacggaagttcccagcatcctggccgctcatagccttccttctctggatgaggagccagtgacttttccaaagagtacgcatgtgccgattccaaaatccgctgataaagtaacggacaagacaaaagtgccaagccgatcccctgaaaactccttggatcctaaaatgagcctcaccggagcacgggagctgctgccacacgcgcaggaagaggccgaggccgaagcagaattgcctccatcttccgaagtgctcgcttccgtcttccctgcccaggataagcctggcgaactgcaggcgactttagatcacaccggacacacaagttccaagtcactccctaattttccgaacacttctgcaactgctaacgcgacaggaggacgcgcattagcgctgcaatcttcacttcccggagctgaaggcccggacaagcccagcgtcgttagtggattaaattctgggcctggccacgtgtggggaccacttcttggcctgctgttactgccccctttagtgctggccggtattttc

SEQ ID NO: 4726 - DNA, 1137 bp, Homo Sapiens
gcgggaaggcaccctcccgtcgttctggtacccggggacctgggcaaccagctggaagccaagctggacaagcccactgttgtgcattatttgtgcagtaagaagacagagtcttacttcacaatctggcttaatctcgagttactcttgcccgttatcatagactgctggattgacaatatccggttggtatataataagacctcaagagcaacgcagtttcctgatggtgtggatgtacgtgtgcccggatttgggaagacgttttcactcgagttcttggacccctccaagagtagcgtcggttcctatttccacaccatggtggagtctcttgtcggctggggttacactcggggcgaggatgtgcgtggcgctccctatgattggcgtcgggctcccaacgaaaatggtccatattttctggccctgcgggaaatgatcgaggaaatgtatcaactctacggcggccctgtggtcctcgtggctcactccatgggtaatatgtatacattgtactttcttcagagacagccacaggcttggaaggataaatacatccgcgcattcgtttcattaggcgctccatgggggggagtcgctaaaaccctgcgcgtgcttgcctccggtgacaacaaccggatacccgtgattggaccactgaaaattcgggaacagcagcgcagcgccgtcagcacttcctggctccttccatataactatacctggtctccagaaaaggtgttcgtgcagactcctacaattaactataccctcagggactataggaagttttttcaagatatcggtttcgaagatgggtggctgatgcggcaggatacagaaggactcgtagaggccacgatgccacctggagtacagctgcattgtctgtacgggaccggcgtgcctacgcctgacagcttctactatgaatcattcccagatcgggatccgaaaatctgctttggtgacggagatgggaccgtgaatctgaaaagcgccctgcagtgccaagcctggcagagtaggcaggagcaccaagtgctcctgcaggaactgccagggtctgagcatattgagatgctggctaacgccacgacactggcctatctgaaaagggtgctgttagggccc

SEQ ID NO: 4727 - DNA, 393 bp, Homo Sapiens
tcattctggcagttccagagacgcgtcaaacatattactgggcgatcagcatttttctcatattatgggtacggctgttattgcggccttggcgacaagggtataccggtggatgacacagataggcattctccttcaagcccaagtccgtacgaaaaacttaaagaatttagctgtcagccagtgctgaactcatatcagtttcacattgtgaatggcgccgtcgtctgcggttgtactttagggccaggggcgtcttgtcattgccgattgaaggcctgtgagtgcgacaaacagtctgtgcattgtttcaaggagtccctgccaacctatgaaaaaaacttcaagcagttttcatctcaacctaggtgtgggcggcacaagccatggtgc

SEQ ID NO: 4728 - DNA, 1545 bp, Homo Sapiens
ggcgtgtattacgcgactgcttattggatgccggccgaaaagaccgtccaagtgaagaatgtgatggacaaaaacggcgacgcctatgggttctataacaactctgtgaaaaccaccggctggggaatcttggagataagagctggctacggcagccagaccctttctaatgaaattataatgttcgtcgccgggtttctggagggttacttaacggctccacacatgaatgaccactacacaaatttgtatccacagctcataactaagccgagcattatggacaaggtgcaggatttcatggagaagcaagataaatggactcgcaaaaacatcaaggagtataagaccgacagcttctggcggcatacaggttatgtcatggcccagatagacggactgtatgttggagccaagaagagggcaatcttggaaggtaccaaacccatgaccttattccagattcagtttctgaattcagtgggagacctgcttgacctgatccctagcctctccccgactaaaaacgggagccttaaagtttttaagagatgggacatgggacactgctcagccctcatcaaggttcttcccgggttcgagaacatcctgtttgcccattcatcttggtacacctacgcggcaatgctccgaatttacaagcactgggacttcaatgtgattgacaaagacacatcaagcagtagactgagctttagttcatacccgggcttcttggaaagcctcgacgatttttatatcttgtcttctggactgatcctgctgcaaactacaaattccgtatttaacaaaactctgcttaagcaagttatccccgagactttgctgtcctggcaacgggtacgagtggcaaatatgatggctgacagcggcaagcgttgggcggatatttttagcaagtacaactctggtacctacaacaaccagtacatggtgttagatctgaaaaaggtcaaactgaatcatagcctcgacaagggcaccctgtatatcgtcgagcagatcccaacttatgtggagtattcagaacagacagacgtccttcgtaagggttactggccgtcctacaatgtgcctttccacgaaaaaatctataactggagcggctaccctctgctcgttcagaagctcggactcgactatagttatgaccttgcaccaagggccaagatctttaggagggatcaaggcaaggttacagatacggcctctatgaaatacataatgcggtataacaattacaagaaagacccctatagcaggggcgacccatgcaatacaatctgctgccgggaggatttgaattcccctaaccctagccctggcggttgctacgacaccaaggtggctgatatctatctggccagtcagtatactagctacgccatttctggcccaacagtgcagggcggtctcccggtgttccggtgggacagatttaacaagactctgcaccagggtatgcctgaggtgtacaacttcgacttcataacgatgaaacccattctcaaacttgatataaag

SEQ ID NO: 4729 - DNA, 606 bp, Homo Sapiens
atcccagcacccgggggcaggtgggctcgggacggacaggtacctccggcatcccggtccagatccgtactgctggatgtgtcagctggacaactgttgatggtcgatggcagacaccccgatgctgtggcatgggccaacctcactaacgccatcagagaaactggctgggctttcttagagctgggtacttcagggcagtacaacgattcattacaggcatatgccgccggagtcgtcgaggccgccgtctccgaagaactgatctatatgcattggatgaacactgtggtgaattattgcggcccttttgaatacgaagtgggatattgcgaacgacttaaatccttcctggaggctaacttggaatggatgcaggaggagatggagtccaatccggacagtccgtactggcatcaggtgcgtctcactctgttacagcttaaaggccttgaagattcctacgaaggtagggtgagcttcccagcagggaagttcactatcaaacctctcggcttccttcttttacagttgagcggggatctggaggatttggagctggcactgaataagaccaaaatcaaaccttctcttgggtccggatct

SEQ ID NO: 4730 - DNA, 486 bp, Homo Sapiens
acctttatacggtactcctctacgtgctttacttttgacgaatattatactattacccttgatattaaggccagcagtcatatttatgaatcaaatgctgtgtatagcgtttttgtccccgtgaatgacagcgtttatgctgtggtgatgaagaccctcgatgaaaacagtgactctgctggcctctggcagcgagcggacaagaactgttacagtaattccacgtactacgtcaaagatcagtatatgaccgtcctcgaagcccagtggcaggcccccgagcctgagaatatcaccgaggtggaaatccaggcttttaccgtacagatccgcgctttgcctattctgtccactctgaagctcagggagaagttgtctactctggccctggctgctaaaattccgcagtcatcagcttttaaacctttctttatgattacaccaaagtcaatacgcctggagggccttgctaaccaagtcttttca

SEQ ID NO: 4731 - DNA, 231 bp, Homo Sapiens
gagccgctggacgactatgtgaatgcacagggagcaagtttattttccgtgactaagaaacaactgggcgccggcagtagggaggagtgcgctgcaaaatgcgaagaagacaaggagttcacttgccgcgcttttcagtaccactcaaaggagcagcagtgcgtgatcatggctgagaataagaaatcatctatcattatcaggatgagagatgtggtcctcttcgagaag

SEQ ID NO: 4732 - DNA, 231 bp, Homo Sapiens
gaacccctcgacgattacgttaacacccagggcccatctctgtttagcgtcactaagaagcagcttggcgctgggtccagggaggaatgcgccgcaaagtgcgaggaggataaggagtttacctgtcgggcctttcagtaccactctaaggagcagcaatgtgtgataatggccgagaaccgcaaatcatccataatcatacgcatgcgcgacgccgtgctgtttgagaag

SEQ ID NO: 4733 - DNA, 1431 bp, Homo Sapiens
atgggcccgcggtccggggagcaccaacgggccagccgcattcccagccagtttagcaaagaggaaagggttgctatgaaagaggccttaaagggagccatacagatcccaaccgtgaccttttctagcgagaaaagcaacaccacagcccttgcagagtttgggaagtatatccacaaagtctttcctacagtggtatcaaccagttttatccagcacgaggtcgtggaggagtacagtcatctgttcactatccagggtagcgacccttcacttcaaccctacttactcatggcacactttgacgtggtgccggctcccgaggaaggatgggaggtaccgcccttctctggtctcgagcgagacggcattatttatggccgtggcacgcttgacgataagaatagcgtaatggccctgctccaggcattggaactcctgctgatccgaaagtatattcctaggagaagcttcttcatctcccttggccacgatgaagagtctagcgggacaggagctcaacgtatttccgctcttcttcagtcccgcggtgtccagctggcctttattgttgatgaaggggggttcattctcgatgatttcatccccaattttaaaaagcccatcgccctgattgctgtgtcagagaagggaagtatgaacctgatgctccaggttaacatgacatctggccatagcagtgccccccctaaagaaaccagcatcggaatcctggcagctgccgtgtctcgcctcgagcaaacccccatgcctatcatatttggcagcggaactgtggtgacagtgcttcagcaactggcaaacgagtttccatttcccgtcaatatcattctcagcaacccctggctcttcgagcctttaattagccggttcatggagcgaaacccgctgacgaacgccatcattcgtaccacaactgctcttactattttcaaggcgggcgtgaagtttaacgtgattcctcccgtcgcccaagctacagtgaatttccgaattcaccccggccagactgtgcaggaggtccttgaactgactaaaaatatcgttgcagacaaccgcgttcaatttcacgtcttgtccgcattcgatcccctgccagtgagcccaagcgatgataaggctctgggttaccagctgctgcgccaaacggtgcagtctgttttccccgaggttaatatcacagcccccgtgactagcattgggaatactgattcaagattcttcacaaatttgacaacaggcatttaccggttctacccaatctacatccagcctgaggactttaaacggattcatggtgttaatgagaaaatcagcgtgcaagcctacgaaacacaagtgaaatttattttcgaactgattcagaacgccgataccgatcaagagcccgtgtctcacctgcacaagctg

SEQ ID NO: 4734 - DNA, 1350 bp, Homo Sapiens
aaagaagtgtgttacgaggacctgggctgcttttcagacaccgagccctggggcgggacggctatccggccactgaaaattttgccttggtcacccgagaaaataggcactcgatttttactgtatacaaacgagaatccaaataatttccaaatactccttctgagcgatccctccacaatagaggctagtaacttccagatggatcggaaaacccgctttataatccatggattcatagacaaaggagacgagagctgggttaccgatatgtgcaagaaactcttcgaagtggaagaggtaaattgtatatgtgtggactggaagaaaggatctcaggcaacatacactcaggctgccaataacgtgagagtggtgggagcccaggtggcgcagatgctcgatatactgttaacggaatactcctaccctcctagtaaagttcatctcatcggccacagtttgggcgctcacgtggctggagaagctggctccaagacccccgggctgtcccgtattacagggcttgacccagtcgaggcaagtttcgagagcactccagaggaagtgcgacttgacccatcagacgctgattttgtagacgtgatccatacagacgctgcaccccttattccattcctcggtttcggcacaaatcagcagatggggcacctggacttcttcccgaacgggggggaatctatgccaggatgtaagaagaacgcactcagtcagattgtggatctggatggaatctgggcaggcacccgtgattttgtagcctgtaatcacctgcgcagctataaatactacctggagagcatattaaacccggatgggtttgcggcttacccttgcacctcttataagtctttcgaatccgataagtgtttcccttgtcccgatcaggggtgccctcagatgggtcattatgccgacaaatttgctggccgcacttctgaagagcaacagaagttttttcttaacacaggagaagcctctaatttcgctcgttggcggtacggcgtcagcatcacactgtcaggcaggacggcaactggacagattaaggttgccttatttgggaacaagggtaacacacaccaatacagcatcttccgcggaattcttaaaccaggcagtacccattcatacgaattcgacgccaagttggatgtggggacgatcgaaaaagtgaagttcctctggaacaacaacgtaatcaatccgaccctgcctaaggtgggggctacaaagattactgttcagaaaggcgaggagaagactgtttataacttctgcagcgaggacacagttcgtgaagataccttgctcacgttaacgccttgc

SEQ ID NO: 4735 - DNA, 228 bp, Homo Sapiens
ttgcacctggatgccagtatccacccattcagattaccattcagctctaaacccttcttattgattccgatgagtaatacaaccctcccgcacacggcctggcccctgtcttttcttcaccagaccgtctcaactttgaaggctgtggccgtgacccatagcctgtggcacttgcaaataccagtggattgtcaggcatgtaacagaaagtccaagaagatttattgc

SEQ ID NO: 4736 - DNA, 669 bp, Homo Sapiens
atgagctcagaaaaatctgggctgccggatagcgtgcctcataccagccctcctccatataatgctcctcaaccaccagccgaaccccctgccccaccgcctcaagcggcacccagctcccaccatcaccaccaccaccattaccatcagtcagggaccgctacattgcccaggttaggcgccggcggtctggcttcatcagctgcaactgctcaacgcggaccttcaagctctgccacgcttccccggcctccgcaccatgccccacccggtccggcagctggggctcccccccctggatgtgcaactttgcccaggatgccgcccgatccctatctgcaagagaccagatttgaggggcctctgcctcctcctcctcctgcggccgctgccccccctccaccagcccctgcacagactgcgcaggcacccggcttcgtagtgcctacgcatgctggcaccgtagggacactgccgcttggcggttatgtcgctccaggatacccactgcagttgcagccttgtaccgcctatgtgcccgtgtatccagtgggcactccttacgcaggggggactccgggcggaaccggggttaccagtaccctgcctcctccccctcaagggcccgggttggccctgcttgagcccaggcggccaccccatgactac

SEQ ID NO: 4737 - DNA, 1092 bp, Homo Sapiens
caggtgagtccctattccgcgccttggaagcccacatggcccgcataccgcctgccggtggtgctccctcaatccactctcaatctggccaaaccggactttggggccgaggctaaattagaggtcagctcttcctgcggcccacagtgtcataaggggacacctctgcccacctatgaggaagccaagcagtatctgtcctatgagaccctctatgcaaatggtagcaggaccgaaactcaggtcgggatttatattctcagttcttctggcgacggcgcacagcaccgcgacagcgggagctcaggaaagagccgtcgaaaaaggcagatttatggttatgattctaggttttccatatttggcaaggattttctgctgaactatccgttttcaactagcgtgaagctgtccactggttgtactggcactctcgtggccgaaaaacacgtgctcaccgcagcgcattgcatccatgacggaaagacctatgtgaagggcactcaaaagttgagggtaggatttctgaaacctaaattcaaggacggtggcagaggcgccaacgacagtacgagcgctatgccagaacagatgaaattccagtggattcgagtgaaacggactcatgtccctaaaggctggatcaagggtaacgcaaatgacatcggtatggactacgattacgcactgctcgaactgaaaaagccacataaacgaaagttcatgaagattggtgtaagccccccagccaagcagcttcccggaggacggattcacttcagtgggtacgacaatgacagacccggaaacctggtgtaccgattctgcgacgtaaaggatgagacttacgatctcctctatcagcagtgcgacgcccagcctggcgcctcaggttcaggagtctacgtgagaatgtggaagcgacagcagcagaaatgggaacgaaagattatcgggatcttcagtggtcaccaatgggtggatatgaatggctctcctcaggattttaatgtggccgtgagaatcacacccctgaaatatgctcagatttgttattggatcaaagggaactatctggattgtcgcgaagga

SEQ ID NO: 4738 - DNA, 768 bp, Homo Sapiens
atggtgggagggcaggacacacaggaaggagagtggccctggcaagtatctattcagcgcaatggcagccatttttgcggcgggagcctcatcgctgaacagtgggttctcaccgccgcccactgctttcggaatacgagtgaaacgagcttgtatcaagtcctcctgggggccagacagttggtacaacctggccctcatgctatgtatgccagagtgcgacaggtggagtcaaatcccctgtatcaggggaccgcatcctcagcagacgttgccttggtggaactggaagccccagtgccatttacaaactacatactcccggtgtgcctgcccgacccctccgtgatattcgagacgggtatgaactgctgggttaccggatggggatctccgagcgaggaagatctgctgccagagccaagaattttgcagaaactcgcagtgcctatcattgacacccctaaatgtaacctgctgtatagtaaagacaccgagttcggatatcagcccaagaccattaaaaatgacatgctttgtgctggatttgaggaaggcaagaaagatgcctgcaagggagattctggcggcccgctggtatgtctggtcggacagtcatggctccaggccggtgttatcagctggggggagggctgtgcccgtcagaatcggccaggcgtctatattcgggttacagcacatcataattggattcaccggataatccctaaactgcagttccagcctgctcggctcggcgggcagaaa

SEQ ID NO: 4739 - DNA, 672 bp, Homo Sapiens
attgttgggggctatacatgtgaagagaatagcttgccataccaggttagcctgaactccggttcccatttctgcggagggtccctgatctctgagcagtgggtggttagtgcggctcactgttacaaaacacggattcaggtgcggctcggtgagcacaacattaaagtgctcgagggaaatgaacaattcatcaacgctgctaagatcatcagacatcctaaatataatcgtgacaccctcgataatgatatcatgttgataaagctcagcagtcccgctgtgatcaacgcccgcgtatccacgattagcctgccgacaacacccccagccgccggcactgaatgtttaatctccgggtggggtaataccttgtcattcggggccgactaccctgatgagttaaagtgtttagatgcaccggttctgactcaggctgaatgtaaagcctcttatcccgggaagatcacaaactccatgttctgtgtggggtttctcgagggggggaaagatagttgccagagagacagcggcggaccagtcgtctgcaatggccagctgcagggagtcgtgagctggggccacggatgcgcatggaaaaaccgacctggggtctacaccaaggtctacaactatgtggactggatcaaggacacaattgcagcgaatagt

SEQ ID NO: 4740 - DNA, 696 bp, Homo Sapiens
gtcccattcgacgatgacgacaaaattgttggcggttatacgtgcgaggagaactccgtaccctatcaagtctctctgaactccggcagccacttctgtggaggtagcctcattagtgaacagtgggtcgttagcgccggacattgctataaacctcacattcaggtgaggctgggagaacacaacatagaggttctcgaagggaacgaacagtttattaatgccgcgaagattatcagacatcctaaatataaccgaattatcctcaataatgacattatgttaattaaactctccacgcctgccgtaataaatgcccatgtaagcaccatatccttgccaacggcacccccagcagctggcacggaatgccttataagcgggtggggcaacacactgagtagtggcgcagattacccagacgaactgcagtgtttggacgcacctgtgctcacacaagcaaagtgtaaggcaagctacccactgaaaattacatccaatatgttctgcgtcggatttctggaaggcggaaaggacagctgtcagggagattcaggtggacccgtggtgtgtaatgggcagctccaggggattgttagttgggggtacggctgtgctcagaagagacggccaggagtgtacaccaaagtctataactatgttgactggatcaaggatactattgctgctaacagt

SEQ ID NO: 4741 - DNA, 735 bp, Homo Sapiens
gtggccgggggcgtagaatcagcccgggggcggtggccctggcaagcatcattgcgcctgagacgacggcatcggtgcggtggcagtcttctgagcagacgctgggtgctttctgccgcacactgctttcagaaacactactacccctccgaatggacagtgcagttaggagaactgacgagcagacctactccgtggaacttacgggcctatagctctagatataaagtccaggacatcatcgtaaaccctgatgcacttggggtattgaggaacgatattgctcttctgcggctggcaagtagtgtcacttacaacgcctatattcagcctatttgcattgaatcaagtacatttaatttcgtccataggcccgattgttgggtgacgggatggggattaatttctccttccgggacccctctccctcccccttacaacctgagggaggcccaggtgactattctgaataatacccgttgtaattatctgttcgaacaaccttccagccgctctatgatatgggactcaatgttttgtgcaggggccgaagatgggagtgtggacacctgtaaaggggactcaggcggtcccctggtgtgtgacaaagacggactgtggtatcaggtgggcatcgtgtcttggggtatggactgtggccagcccaatcggcctggtgtgtatacgaacatctctgtctactttcactggatcagaagagtcatgtctcattca

SEQ ID NO: 4742 - DNA, 951 bp, Homo Sapiens
ggtagagttggggcacagggcggggtggcccttctcttcccttcagcactgccgagcggccctggaggccaggaccccggggcctcaggctgggagccgcctcctgtaggtgctcccggctcacccgctgccccacagtcaagaggaaatgccgtgcgtccagcttctgtcctgttacctagcgcttgcggccagcgtacctctagaattaccggtgggttgcccgccccagatagaaagtggccttggcaggtcagcctccagaccagtaacaggcatatttgcggcggatccctgattgcgcggcattgggtgctgaccgcagcccattgcatctctggccacctggaatacaccgtaaagctcggcgacacaaacgttcaccacagatctaaaaccgccctggttgtacccgtcagggacgtggtaattcatcgctacttcactagtccaggcatcatcgagaacgatatcgcactggccctgttggatttccctgtcaattattccactcatatacaactcgtgtgtctgccagagcaggcattcatggtgcaggctggcactaattgctgggtcacaggctggggcaaggttaacgaaaccgagaaaatcgtcaccgagccccaggaggccgagctgagcatcattcttcacgacaagtgcaacgaggtccttaaggaaaagattagaatgcgtagtgagatggtgaagaaggggactatttgcggatataacgatcagggaaaggacgcttgccagggcgactctggcggaccccttgtgtgtgagcttaacggcacctgggtccaggttggaatagtctcttggggcattgggtgcggccgaaaagggtaccccggcgtatacactgaggtgtccttctataagaagtggatcatcgatcacctgagacaggcatcttgtcttaattccaagacatcttcttca

SEQ ID NO: 4743 - DNA, 1056 bp, Homo Sapiens
ttcctggccttggctcaactcttaacctccaagaatttgcctgatacagtggatggtcaattacccatgggacctcatagcagggcctctcaggtcgctccagagaccacctccagtaaggttgataggggcgtgtcaaccgtctgcggcaaacccaaggtggtcggcaagatttatggcggacgtgacgccgcagccggtcagtggccatggcaggcatcccttctgtactggggttctcacctctgcggggccgtgctcattgatagctgctggctcgtttccacaacccactgcttcctgaataagtctcaagcaccgaaaaactatcaggtgctgcttgggaacattcaactgtatcatcagacccagcacacgcaaaaaatgtcagtgcatagaatcattactcacccagatttcgagaagttgcatccctttgggagtgacattgcaatgttgcaactccatctgcctatgaatttcacatcatacatcgttcccgtctgcttaccaagcagggatatgcagctgccttccaacgtgagttgttggattactggctggggaatgttaacagaagatcacaagagggggcctgtccatacagcagtgccctcccggcttcaggccgtgtgttgctctgggtgtcgcggacagcgggtcgggtcccgtgtcggtcggttcagaagtatgatcgtccattccgaagggcaacttcggagcttgatgccgggagacttccatctgggggattctggcggaccactggtctgctacctgccaagcgcatgggtgcttgttggactggccagttggggccttgactgccgtcaccctgcgtatccatctatttttacccgggtaacctattttatcaattggatcgacgagataatgcggttgacacccctctctgaccccgcacttgccccgcatacttgtagccctccgaaacctctgcgagcggctgggcttcctgggccatgcgccgcacttgttctcccccagacgtggttgttgctccctctgaccctgagggcaccctggcagacactc

SEQ ID NO: 4744 - DNA, 777 bp, Homo Sapiens
ataaccggagggatggaggcagaggtgggggagttcccctggcaggtgagcatacaggcccggtctgaacccttctgcggggggagcattctgaataagtggtggatccttacagccgcccactgcttgtattccgaagagttgttccccgaggaactgtccgtagtgctcgggacgaacgatttgacctccccctccatggagattaaagaggtggcctcaattatcttacataaggacttcaagagagctaacatggacaatgatatcgcactgctgttactcgcctctcccatcaaattagacgatcttaaggtccccatctgcctgccaacccagccaggccccgccacgtggagagagtgctgggtcgctggttggggacagactaacgctgctgacaagaactccgtcaagaccgacctcatgaaagcacccatggtcataatggattgggaagaatgcagcaagatgttccctaagctgactaagaacatgctctgcgcagggtataaaaacgagtcttatgatgcttgtaaaggtgattcaggcggtccgttagtatgcacccccgaacctggcgaaaaatggtatcaggttggcatcatctcctggggtaagtcatgtggggaaaagaacacccctgggatatatacgtctttggtgaactacaacttgtggatcgaaaaggttacacagcttgaaggaagaccgtttaatgccgagaagcgccggacaagcgtgaaacagaaacccatgggaagtccagtgtcaggg

SEQ ID NO: 4745 - DNA, 672 bp, Homo Sapiens
tttaatccagactacacagtgtcttcaactcccccctatctggtgtatttgaaaagtgattacttgccatgcgcaggcgtcctgatccacccactctgggtgatcacggcggcacattgtaaccttccaaagctcagagttatattgggggtgaccatccctgccgattctaacgagaaacacctgcaagtcatcggttatgagaaaatgatacaccacccacattttagcgtcacttccatcgatcacgatattatgctgatcaaattaaagacagaagcggagctgaacgattatgttaaactggccaatctgccataccagacaatctcagaaaataccatgtgctccgtgtccacatggtcatacaacgtgtgtgatatctacaaggaaccagatagccttcaaactgtcaacattagtgtgatatccaagccccagtgtcgtgatgcctacaagacgtataacataacagagaatatgctgtgcgtgggaatcgtccccggacggcggcagccatgcaaagaagtcagcgccgctccagccatttgtaatggtatgcttcagggcatcctgtcttttgcagatgggtgtgtgttaagagccgacgtgggcatatatgctaagattttttattacataccctggatcgagaatgttatccagaacaac

SEQ ID NO: 4746 - DNA, 252 bp, Homo Sapiens
agcctgccatgtgatgtttgccaagatattgccgctgccgccggtaatggccttaatcccgacgccacggaatccgatatcttggccctggtgatgaaaacatgtgagtggctcccctcacaggagagtagcgccgggtgtaaatggatggtggacgcgcactctagtgcaattctcagcatgctgcggggagcacccgacagtgctcctgcacaagtgtgtacagctctttccctgtgcgaacccctgcag

SEQ ID NO: 4747 - DNA, 342 bp, Homo Sapiens
tctgaaggacatcccagccacccacctgcagaagaccgggaggaagcagggagccctacactgccgcaaggaccacccgtcccgggcgacccatggccaggagcaccacctttgttcgaagatcctcccccaacccgtccaagtcgaccctggcgggacctccctgagactggcgtgtggctccccgagcctccaaggactgatccgcctcagcctccgagaccggacgatccttggcccgccggccctcagccacctgagaatccctggccccccgccccagaagttgacaaccgtcctcaagaggagccggacctggacccacccagggaagaatatcga

SEQ ID NO: 4748 - DNA, 252 bp, Homo Sapiens
tccgttagcgaaatccagcttatgcataatctcggcaagcaccttaatagcatggaacgggtggaatggttgcgtaaaaaacttcaggatgtccataactttgtcgcgttaggagctccgctggcaccgagggacgccggctctcaacggccaaggaagaaggaagataacgtgcttgtggagtctcacgaaaaaagcctgggtgaagcagataaggcagacgttaacgttctcacaaaagctaagagccag

SEQ ID NO: 4749 - DNA, 1359 bp, Homo Sapiens
caagaagccgccccagtaggaccccgaaagccctttttcgagcggctgaggcggttggaggaacaattccgacggtttcaggaagtgacctggactcacctgcagaatattgccagcaattacaatgtgtcctacaatgtggacgtgaggtttcgctctctcgcagaggagtcccaggccgtggcacaggccgttaaccggagccaagcctccgtgcaaggcgagttggctcagctgaaagcgtgggtccggaaacttcagaggagaggcaggaaagttgacacgcggttgcgcgctcttgacctgacccttggggaacgttcacagcagagggctagagaaagaaaagcacacaaggcccagcgagatgccctgcaggactcccttgcaagattggaaggactggtccactctcagggcgctcgactggctgctctggaaggcagacttcccgtagcgcatcccggcactgcggccttggggcctgccctcgttcccacaccaactcagcccgaagagctggggccaacctccctgaagctgcagcgcgataggcaggaattgcgagccgcttcagagcatcgagggccgccacaggatagtagtgcgccgttgcaggggcggcgcgagccaccagcttccggctcccaccgggtactctctggaactgcccctaaggaccccaggcagcaggcatggtcccctcaggtcccgggagagatttgcggcgtgggtcccacattggtgttccctaatgcctccacacgcaacgtagtattcctgagccctgggtttgtaacagctctccgggctctgtctttctgctcttgggtgaggaccgcgtcagggcgtttgggaactctgctctcatacgcaacggaggataacgacaataagctggtgctgcacgggcgcgatagtctccttccaggatctatccactttgttatcggtgaccccgctttcagggaactgcctctgcaactccttctggacgggcagtggcaccacatttgtgtaatctggacctctactcagggaaggtattggctgcatgtggatagaaggcttgtagccacgggctcccgttttcgcgagggctacgagatcccacccggaggaagcctggtgctcggtcaagagcaagacagtgtcggtgggggatttgatagctcagaagccttcgttggtagtatgtctggattagcgatttgggatcgggccctggtccctggtgaagtggcgaatttagccatcggaaaggaatttcccacgggcgcaatcctgactctggccaatgcagccttagctgggggtttcgtacagggggccaactgtacatgcttggaaagatgcccc

SEQ ID NO: 4750 - DNA, 579 bp, Homo Sapiens
gggctggccgaccctcactctctttgctacgatatcactgttattcccaagtttcgtcccgggcctcgctggtgcgctgtacagggacaggtagacgaaaagacatttctccattacgattgtggttccaagacagtgactcccgtatcaccccttggaaagaagctgaatgtgaccacagcttggaaagcacagaaccctgtcctgcgcgaagtggtggacattctgacggagcaactgctggatatccaactggaaaattatatacccaaggaaccactgaccctgcaggctcgtatgagctgtgaacagaaggcagaaggacacggctctggtagctggcaactgtcctttgatggccagatattcctcctgttcgatagcgaaaaccgaatgtggaccacggtacatcctggcgctcgcaagatgaaagagaagtgggagaacgataaggacatgacaatgtcttttcactacatctcaatgggcgactgtaccgggtggcttgaggattttctcatgggaatggacagcaccctcgagccaagcgccggagccccaccaacaatgagttccggg

SEQ ID NO: 4751 - DNA, 579 bp, Homo Sapiens
cgtcgtgacgatccccacagcctgtgctacgacataacggtcatcccaaaattcaggcctgggccacgttggtgcgctgtccaggggcaagtggacgagaagacctttctccactacgattgtggaaacaagaccgtgacacccgtgtccccgctgggaaaaaagctgaacgtaacaatggcctggaaggcacaaaatcctgtgcttcgggaggtggtggatatcctgacagaacagctcctggacatccaactggagaactataccccaaaggagccgctgaccttgcaggctagaatgagctgtgagcagaaggccgaggggcactccagcggttcttggcaattctccatcgatggccagacctttctgctgtttgattccgaaaaaagaatgtggactaccgtccaccctggcgcccggaagatgaaggagaagtgggagaatgataaggatgtcgcaatgtcctttcactatatttccatgggtgattgcattggttggctggaagacttcctgatggggatggatagcacccttgagccctctgctggcgcccctctggccatgagctccgga

SEQ ID NO: 4752 - DNA, 684 bp, Homo Sapiens
atggccgtggatgttgagttcggagtggctggttggtgggaggccgccgcccccttaagtcccagtgctgttgctgccacatttaccgagacctggcctggctccgagcgagctgagcccgggcgaattcaacacccactctggcccgggagttcagaggggctccagcttctggtctgctttctgctccttaatagctgtccaggcgggtgctccgataccagcgcacacgacggtcaggatcaagttggggttgggcagctctggcctctgcagggatttgcaacaccagtgtttcagcacctgcaagtagtgctgcagcagataatccctcagggtttgttttggaaggatgacattacccaagatgcaatgattcagaagatggaacacgcctctcggctgcacccacaggagccatgtctcaaagatgggaaagccttgttcccaacaaaaactacagagtcccctctcgccaaagtgaacagggatcagtgctttacgtctgaggtcgtgtcaaaggcactcaagcaggaagtggccaaccctgtgaaaattacatacagatgcagttacggcggcctcgatatgatgcaggcacccggccccagcaaagaggaaattatttataaaattatgagattgctgtgggctaccagctactgcggcccacaaccatgtggt

SEQ ID NO: 4753 - DNA, 501 bp, Homo Sapiens
gacaatgcctcccaggaatactataccgcactgattaatgttactgtgcaggagccaggacggggggcaccactcactttcagaatagaccgcggccgctacgggctcgattcccctaaagcagaggttaggggacaggtgcttgcacctttgcccctgcatggggttgctgatcatctgggctgcgatcctcagactaggttctttgtgccgccaaatattaagcagtggattgctctgctccaacgcggaaattgcaccttcaaagagaaaatctcacgggctgctttccataacgcagtggctgtcgttatttataataataaaagcaaagaggaacccgtcaccatgacacacccaggaactggcgacataattgccgtgatgattacagaactccggggcaaagatattctgtcttatcttgagaaaaacatctcagtgcagatgaccatcgcagtgggtacccggatgccaccaaaaaatttttcacgcggttcc

SEQ ID NO: 4754 - DNA, 450 bp, Homo Sapiens
aaggccatttggacggctcatctcaatattactttccaggtcggcaatgagataacgagcgagctgggggagtcaggagtttttggcaaccattcaccactggaacgggtcagcggcgtggtggccctgcctgaagggtggaatcagaatgcctgccatccccttactaacttctcaagaccaaagcaagcggattcctggctcgccctcatcgagagggggggatgtacgtttacccataagatcaacgtagcagcggagaagggggcgaacggggtgatcatttacaattaccagggcactggatccaaggtcttccctatgtcccaccaaggcacagagaacatcgtggcagtcatgatttccaacctgaagggcatggaaatactgcactccatccagaagggagtgtacgtcaccgtcattatagaagtaggtcggatgcatatg

SEQ ID NO: 4755 - DNA, 447 bp, Homo Sapiens
ctcattcgggctactagcgaccataatgccagtatggattttgccgatctcccagcgctcttcggggctacactgagtcaggaagggttgcagggtttcttagtggaggctcaccctgataacgcctgttcacctatcgcgcccccaccgcctgccccagtcaacggatcagtgtttattgctctgcttcgaaggttcgactgcaacttcgaccttaaggttcttaatgcacagaaggccggatacggcgccgctgttgtccataatgtcaatagcaacgagcttcttaacatggtgtggaactcagaagagatccagcagcaaatctggattccttcagtattcataggggaacggtcctcagagtatctgcgggcattgttcgtttatgagaaaggggcccgggttctgctcgtccctgataacaccttccccctgggctattac

SEQ ID NO: 4756 - DNA, 543 bp, Homo Sapiens
atgtggctgttcactgtgaatcaagtgctgcgtaaaatgcagcgcagacactcttccaacactgataatatccctccggagcggaataggagccaagctctgagcagtgaagctagcgttgatgaggggggcgtctttgaaagcctgaaagccgaagcagcgagccctcctgctctttttagcggcctctccgggagtctgccaaccagctctttcccctcttctctcgtgttggggtctagtgctggcgggggcgacgtgttcatacagatgccagccagccgtgaagaaggtggggggaggggcgaaggcggtgcttaccaccacagacaaccacatcaccactttcatcatggcgggcaccgcggggggagcctgctgcaacatgtcggaggggaccaccggggacactccgaggaagggggcgatgagcagccaggaacacctgcaccggcgctgagtgagcttaaggcagttatctgttggctgcagaagggccttccttttatattgatacttctggccaaactttgtttccaacac

SEQ ID NO: 4757 - DNA, 666 bp, Homo Sapiens
caggggaaccgctggaggaggagcaaaagagcttcttacgttagtaacccaatctgcaagggttgcctgagttgttccaaagacaatggatgttccagatgccagcagaagcttttcttctttcttaggcgcgaaggcatgagacagtacggagagtgtctgcactcttgtccctcagggtattatgggcaccgcgcaccagatatgaatcgctgcgcacgctgcagaattgagaactgcgattcttgtttttctaaagacttctgtaccaagtgtaaggtgggtttttacctgcacagaggacgctgttttgacgagtgccctgacgggttcgcccccttggaagagacaatggaatgcgtagagggctgcgaagttggccattggtctgaatggggaacctgctcaagaaacaaccgcacttgtggattcaaatggggcttagagactcgcactagacagatcgtgaagaaaccagtcaaagataccatcctctgtcctaccatcgcagagtcacgcagatgtaagatgacaatgcgtcattgcccaggcgggaagaggacgcctaaagccaaagaaaaacgaaataaaaagaagaaacgcaagttgatagaacgcgcacaggaacagcattcagtgttcctggccacagatcgggcaaaccaa

SEQ ID NO: 4758 - DNA, 273 bp, Homo Sapiens
accaaacttgaagagcatttggagggaatcgtcaatatcttccaccagtatagtgtgaggaagggacactttgacaccctctcaaaaggcgaactcaagcaactgctcaccaaagaacttgcaaacacaatcaagaatatcaaagataaggccgtgatcgatgagatttttcagggactcgacgctaatcaggacgagcaagtggactttcaggaattcattagtctggtggccatcgcgctcaaggcagctcattaccatactcataaagaa

SEQ ID NO: 4759 - DNA, 1242 bp, Homo Sapiens
tcaagacctagatcttccccggacgatctgaaggcgctcacccgtaatgtgaatcgcctcaatgagtcattcagggacttacagctccggctccttcaggctcccttacaagctgatcttaccgaacaagtttggaaagtacaagacgcacttcaaaaccagagcgacagcctcctcgcactggctggagctgtgcagcgcctcgagggtgccctctggggcctgcaggcccaggcagtgcagaccgaacaggccgttgcactcctcagagatcggacaggccaacagtctgacactgcccaactcgaattataccagttacaggtggagtctaacagctcccaactcctgctgcggcggcatgcggggctgcttgatggccttgcgcggagagtaggaatattaggagaagaattggcagatgttggcggggtactccgagggcttaaccatagtctctcctacgatgtcgcacttcacagaacccggctccaagatctgagggtgcttgtatccaacgcctcagaagacactcgacgtcttcgtctggctcacgtgggaatggaactgcagctgaagcaagaactggcaatgctcaatgctgtgaccgaggatttaagactcaaagattgggaacactctattgcactgcgtaacatctcactggccaaagggcctccagggcctaaaggagaccagggagatgagggaaaggaaggaaggcctgggatccccgggctccccggcctgagaggcctcccgggcgagcgggggactcctgggctgcccggtcccaaaggcgacgatgggaagcttggcgccactggccctatggggatgagggggtttaaaggggacagaggcccaaagggcgagaagggcgaaaaaggcgatagagcaggcgatgcctctggcgtagaggcgcctatgatgatcagattggtcaacggaagtgggcctcatgaggggcgtgtggaagtgtatcacgatcgtcgctggggaaccgtatgcgatgatggctgggataagaaggatggagacgtcgtctgccggatgctgggattccgaggcgtcgaagaagtgtacaggactgccaggttcggccaggggacaggccggatttggatggatgacgtagcgtgcaaaggaacagaggaaactattttccgctgctcattcagcaaatggggagtcacgaactgcggccacgccgaggacgcctctgtgacatgtaatcgccac

SEQ ID NO: 4760 - DNA, 216 bp, Homo Sapiens
gaagacaacgatgagttttttatggactttttgcaaactctgctggtcggcacacccgaggagctgtacgagggtacattgggcaagtacaatgtgaatgaggatgcaaaggcagccatgacagaactgaagtcctgtatcgatgggctccagccaatgcataaagccgaactggtgaaactgttggtgcaggttctcggttctcaggacggggca

SEQ ID NO: 4761 - DNA, 1161 bp, Homo Sapiens
atgaaacctggacccccacatcgcgccggtgcagcacatggcgctggcgcaggggccggagcagccgccggcccaggagcacgcgggctcttgctgccgccgctgctgttactcctgctcgccggccgagcagctggcgctcagagatggaggtccgaaaacttcgaaagaccagttgatctggagggcagtggcgacgacgatagttttcccgatgatgagttggacgacctgtactccgggtccggctcagggtacttcgaacaggagagcgggattgaaaccgctatgagattcagcccagacgttgcattggccgtgtccacaacaccagcagtgctccccacaactaacattcagcctgttggcaccccattcgaggagctgcctagtgagcggcccacactcgaacccgccacctcacctctggtggtgaccgaagtcccagaggaaccctctcaaagggctactaccgtaagcactaccatggcaaccaccgcggctacctctacgggtgatccaacagtagccacggtcccggcaacagttgctacggccactcctagcaccccagccgcacccccattcacggccacaaccgccgtgattcgaaccacgggtgtcagaagactgctcccgttaccccttacgacggttgctaccgctcgggccacaacccctgaagcgcccagtcccccaaccacagcagcggttctggatactgaggcaccaacgcccagactggttagtaccgcaacctcccgcccaagggcactgcctaggccggccaccacacaggaacccgatattcccgagcgatccactctgccattggggacgacagcacccggacctaccgaagtggcccagacccccactccggagacctttttgacaaccataagggacgagcctgaggtgcctgtctccggcggacccagcggcgatttcgagctgccagaagaggaaactactcagcctgatacagccaacgaggtagtggcagtcggtggggccgccgccaaggccagctcaccacctggaaccctcccaaagggcgctcggcctgggcccgggctcttggataacgccattgatagcggctcaagtgccgctcagctcccccagaagagtattctcgagaggaaagaggtcctggtg

SEQ ID NO: 4762 - DNA, 426 bp, Homo Sapiens
aaggggctcatggtgatcactgggtccgaaagcccaatagtgttgctgtccggctccatggagcccgcatttcataggggctatctgctgtttctgaccaatcgggtagaagatccgatcagggtaggcgaaatagccgtattacggatcgagggaaggaagattcctatcgtacaccgtgtactgaaaattcatgagaagcagaacgggcacataaagttcttaactaaaggggacaataacgctgtcgatgatcgaggcttgtataagcaagaccagcactggctggagaagaaggatgtggtcggacgggcccgcggctttgttccgtatattggaattggcacatctcttatgaatgactatcccaaacataaatatgaagttttgtttcttctgggactgttcgtcctggtccaccgggag

SEQ ID NO: 4763 - DNA, 1317 bp, Homo Sapiens
cagaaaggcggctctaagggccggctgccatctgaattcagccagtttcctcacggacagaagggccagcattactctggacagaagggtaaacagcaaactgagagcaagggaagtttctccattcaatatacctatcacgtggacgcaaacgatcacgatcagtcccggaaaagccagcagtacgaccttaacgcactgcataagaccacaaagagccagcgccacttggggggatcccagcagctgctgcataacaaacaggaggggagagatcatgacaagagcaagggtcacttccatcgcgtggttatccatcacaagggcggcaaagcccatcggggaacccagaacccttctcaagatcaggggaacagcccatctggcaagggaatctccagccagtactcaaacaccgaagaaagactctgggtccacggtctcagtaaggagcagacctccgtctccggtgcgcaaaagggccgaaaacagggcggtagccagagcagctacgttttacagacggaggaattagtggcaaataagcagcagagggagacgaaaaattcacatcagaataaaggacactatcagaacgtggtagaggtgagggaggagcattccagcaaggtccagacgtccttgtgtcctgcgcatcaggacaagctccaacacggcagtaaggacatcttcagcacacaagacgagctgttagtgtataataagaaccagcaccaaaccaagaacttgaaccaagaccaacagcacggccgcaaagcaaacaagatttcctatcagagcagttctactgaagaaaggcgcttacactacggggaaaatggtgtccagaaggacgtctctcagtcaagcatatacagtcagactgaggagaaagcacaggggaagtcccagaagcaaattacaattccctcccaggagcaggagcattcacagaaggcaaacaaaatcagttatcaaagctcaagcacagaggagaggcgtcttcattacggcgagaacggggtccaaaaagacgtaagtcagcggtccatatacagccagaccgaaaaacttgtggccggcaaaagtcagattcaggctcccaacccaaagcaggagccttggcacggtgagaatgccaagggcgagtcaggccaaagcactaatcgggagcaggacctcttaagccatgaacagaagggccggcatcagcacggatcccacggcggcttggatattgtcattatagaacaagaggacgattccgaccgtcatctcgctcagcacctgaacaacgacagaaacccactgttcaca

SEQ ID NO: 4764 - DNA, 858 bp, Homo Sapiens
cttgtcgatcaggaagcttcagatctgattcacagcggccctcaggattcttcccctggccctgccctcccatgccacaagatcagcgtgagcaacattgattttgccttcaagctgtacagacagttagccttgaatgcacctggagaaaatattctgtttttcccagtctctattagcctggcattggcaatgctttcctggggcgcccccgttgcctctagaacacagctgctcgagggattgggatttactctcacagtcgtgccggaggaagaaattcaggagggattttgggatctgctgatacgccttagagggcaagggcctcgactgctgcttacaatggatcagaggagattcagtggtcttggtgcaagggcgaatcagagcttagaagaagcgcaaaagcacattgacgagtacaccgagcaacaaacccagggcaagctgggagcttgggagaaggatctgggcagcgaaacgactgccgtccttgtgaatcatatgttgctgcgggcggaatggatgaaacctttcgattctcatgcgacctcacccaaggagttttttgttgacgagcacagcgcagtgtgggttccaatgatgaaagagaaggcatctcatcgcttcctccacgaccgcgagctccagtgctctgtacttagaatggaccacgccggtaataccactactttctttatcttcccgaataggggaaaaatgcgtcacttagaggatgctctgctcccagagaccctcatcaagtgggactccctgctgcgtacgagggagctggatttccattttcccaaattcagcatcagccgaacctgccgactggaaatgttgttgccg

SEQ ID NO: 4765 - DNA, 1197 bp, Homo Sapiens
agtctcgttgaggacccacagggagacgccgcgcagaaaaccgatacatcccatcatgaccagggcgactgggaggacctcgcttgtcaaaaaattagctacaatgtgaccgatctggccttcgacctgtataagagttggcttatctaccacaaccagcacgtcctcgtgacacctacctccgtggctatggcttttaggatgctgtccttgggaacaaaggccgataccaggacagaaattttggagggactgaacgtcaacttgactgaaacacccgaagccaagattcatgagtgtttccaacaggtattacaagccctgtcacgtccagacacacgcctgcaactcacaaccggttccagcctcttcgtgaataagtctatgaaacttgttgacacctttctcgaagacacaaaaaagctttatcactctgaagcatcctctattaattttcgggataccgaggaggcaaaggagcagattaacaattacgtagaaaagcgcactggtcgaaaggtggtcgacctggtgaagcacctgaagaaggacacatctctggccctggtggattacatctctttccacggcaaatggaaagacaaatttaaagcagaacgcatcatggtcgagggttttcacgttgatgataagacaatcattcgcgtccccatgattaatcacctgggccgttttgacatccacagagatcgggagctgagcagctgggtgctcgcccaacactatgtgggcaatgccactgctttcttcattctgcccgacccaaagaaaatgtggcagctggaggaaaagctgacctactcccacctggagaacatacagcgcgcatttgatattcggagcattaaccttcattttccaaaactgtctatttctggcacgtacaaacttaaacgggttccccgcaacctgggcataacaaagatcttctccaacgaggcagatctgagcggcgtttcccaggaagcacctctgaagctgagcaaggccgtccacgtggccgtcttaacaatcgatgaaaaaggcaccgaagccaccggggctcctcatctcgaggagaaagcgtggtctaaataccaaaccgtgatgtttaatcggccattcctggtcatcatcaaagaatacattactaatttccccctgttcatcggtaaggttgtgaatcccacgcagaaa

SEQ ID NO: 4766 - DNA, 1125 bp, Homo Sapiens
atggatgcgttgcagctggcaaattctgcttttgccgtcgacctgttcaagcagctctgcgagaaagaaccactgggcaacgtattattcagcccgatctgcctctctacctctctgtctctcgcacaggtaggtgctaagggcgataccgcaaacgaaattggccaggttctgcatttcgagaacgtcaaagacgtgccattcggtttccagaccgtcactagcgatgtgaacaaactcagcagtttttactcactcaagttgattaagagattgtacgttgacaaatccttgaatctgtctacagagttcatttccagtactaaacgcccttatgccaaagagcttgagaccgttgacttcaaggataagcttgaggaaaccaaaggccagatcaacaattcaatcaaagacctgactgatggccattttgagaacattctggctgataatagtgtgaacgaccaaaccaagatcctcgtcgtaaacgccgcctatttcgtgggaaaatggatgaagaaattctctgaaagcgaaactaaggaatgtcctttccgggtcaacaaaacagacacaaaaccggttcagatgatgaatatggaagcaaccttttgtatgggaaacatcgattccatcaactgtaaaatcatcgagctgccctttcagaacaagcacttgagcatgttcatcttactgcctaaagatgtggaggacgagtccaccgggctggaaaagatcgagaaacagctgaatagtgagtctttaagccaatggacgaacccctctaccatggccaatgctaaggtaaaactgagcatcccaaagttcaaggtggaaaagatgatcgaccctaaagcgtgcctcgaaaacttggggcttaagcatattttttcagaggacacaagcgacttcagtggcatgtctgaaacaaaaggggtggcattgagtaatgtaatccacaaagtttgtttggagatcacagaggacggaggagattccatagaagtgcccggcgcccgcattctgcagcacaaagatgaacttaatgccgatcatccattcatatacatcatacgtcataataaaacgaggaacatcatcttttttggcaagttctgcagcccc

SEQ ID NO: 4767 - DNA, 1296 bp, Homo Sapiens
cacggaagcccggtggatatctgcacggccaagccgcgcgatattccaatgaatcctatgtgtatttatcgtagccccgagaaaaaagccactgaggatgagggcagcgagcagaagattccagaagcgactaatcgccgggtctgggagctgtcaaaagcaaactcccgcttcgccaccaccttttatcaacatctggccgacagcaaaaacgataacgataacatttttctgtccccactttctatctctactgcttttgcaatgaccaagctgggagcctgtaacgatacattgcagcagctgatggaggtctttaagtttgacacaatcagtgaaaaaacttctgaccagatccacttctttttcgctaaattgaattgccggttgtacagaaaagccaacaaatcctcaaagctcgtgtcagccaatcggctcttcggagacaagtctttaacctttaacgaaacgtaccaggacatcagcgaactggtgtacggagcgaagttacagccactcgacttcaaggaaaatgcagaacaaagtagggctgccattaataagtgggtgagtaacaaaacagaagggaggattaccgatgtcattccttccgaggcaataaacgagcttaccgtgcttgtcttggtaaacaccatttactttaagggcttgtggaaatccaaattttcaccagagaacacacggaaggagctgttttacaaggcggatggcgaaagttgcagcgcatccatgatgtaccaggaggggaagttcagatatcgcagggtggcagaggggacccaggttctggagctccccttcaaaggcgacgacattaccatggtgctgatcttaccgaaacctgaaaagtctcttgctaaagtcgaaaaagagttgaccccagaggtccttcaggaatggctggacgagttggaggagatgatgttggtggttcacatgccccggttccggattgaagatggcttctctctcaaggagcagctgcaggatatggggctggtggacctgtttagtcctgagaagagcaaattgccaggcatcgtggccgaagggcgggacgatctctacgtgtctgatgcatttcataaggctttcctggaggtgaatgaagaggggtctgaggctgctgcttctacagccgtcgtgatcgctggccgctcacttaaccccaaccgggtgactttcaaagcaaatcgcccttttttagtgtttatccgtgaggtcccactgaatacaattatctttatgggtagggttgcaaacccctgtgtcaaa

SEQ ID NO: 4768 - DNA, 1212 bp, Homo Sapiens
cacctgcgcgagggcatgacactcctgaaaactgagttcgctctgcatctgtatcaaagtgtcgcagcgtgccgcaacgagactaacttcgtgatcagcccagccggggtgtcactgcccttagaaatcttgcagttcggcgcggaggggtccaccggccagcagttagcggacgccctgggatataccgtgcacgataagagggtcaaggatttccttcacgccgtatacgctaccctgcccaccagttcccagggtaccgaaatggagctggcctgctcactgttcgtacaggtgggcacgcccctctctccctgtttcgtggaacatgtaagttggtgggcaaacagtagcctggagcccgcggatctttctgagccaaactccaccgcaattcagacatccgagggcgcttcacgcgagaccgcgggaggtggaccctcagaaggccccgggggctggccctgggagcaggtttctgcggccttcgcacagctggtcctggtatctaccatgagtttccaagggacatggaggaaaaggtttagctcaactgatactcagattttgccatttacatgtgcctatggccttgtgcttcaggtcccaatgatgcatcaaaccaccgaagtaaactacggccaatttcaggacacggcaggacaccaggtgggggtgctcgaacttccttacctgggaagcgcagtgagtctcttccttgtcctccctcgggacaaggacactcctctgagccacatcgaacctcatcttactgcaagcacaatccacttgtggactacgtccttgcgtagggcccggatggacgtattcctcccacggttccggatacaaaaccagttcaatttgaagtccatattgaattcatggggggttacagacctgtttgatcccttgaaggccaacctcaaaggaatatctgggcaagatggcttctacgtgtcagaagcaatacacaaggcgaagatcgaagtgctcgaagagggaactaaggccagtggagcaaccgcgctgctgttgctgaagcgcagcaggattcctatttttaaagctgatcggcctttcatctactttctccgggagcccaacaccggcatcaccgtcttctttgataggatccagattatataccaatgcctcagcagtaacaagggcagttttgtacactaccccctgaagaacaagcacagtttt

SEQ ID NO: 4769 - DNA, 1182 bp, Homo Sapiens
accggtgcaacattccctgaggaggctattgcggatttatctgtcaacatgtataatcggctgcgcgccaccggagaggacgagaacatcctgttctcccccctcagcattgcgcttgccatgggtatgatggaattaggggcccaaggttccacacagaaggaaatccgccatagcatgggatatgattccctgaagaatggcgaagaattttccttccttaaggaattcagcaacatggtgacagcaaaggagagccaatacgtgatgaagattgccaattctctcttcgtgcagaacggctttcatgttaatgaagagttcttacagatgatgaaaaaatacttcaacgcagcagtcaaccacgtggacttcagccaaaatgtggcggtcgcaaactacatcaacaaatgggtggagaataacacaaacaacctcgtcaaggacctggtctcaccccgcgacttcgacgctgcaacttacctcgctctcattaacgccgtgtatttcaagggtaattggaaatcacagttcagacccgagaatacacgcaccttctcttttactaaggatgacgagtctgaagtgcagatccctatgatgtaccagcaaggggaattttattacggagaattcagcgatggcagcaatgaggcaggagggatatatcaggtgctggaaattccttatgagggtgacgaaatttccatgatgctcgttctgtcccgccaggaagtgcccctcgctaccctggagcccttagttaaggcccagctggttgaagagtgggccaattccgtgaaaaaacagaaggtggaagtgtatcttcctagatttactgtcgaacaggaaattgatttgaaggacgtcctgaaagctctcgggataactgaaatctttatcaaggatgccaacctcacgggtctcagcgacaataaggaaattttcctgagcaaagctattcacaagtccttcttggaggttaacgaagaaggatcagaagctgctgcggtcagtgggatgattgctatcagtagaatggcagtgttatacccccaagtcatcgtcgatcacccattcttcttccttatccgcaacagacgaacgggcaccattctgttcatgggccgggttatgcaccctgaaaccatgaacacatcaggccacgacttcgaggaactc

SEQ ID NO: 4770 - DNA, 282 bp, Homo Sapiens
atgagggcagggttttccgactttcaactcataagagaccaggtcctgttcctgcaagaccaggcccagcggctgacagagtggctccagctgtctggttttgagaaccctgtctctgaatcaaccactctctgcctccgtgaaagagaaaagcggatccccacttgcgtggcggtttgtgtgcccagtcccgggaccgtccacaccgcactcttacatcccactaccctgagtcaatccaggagcagctcagaggcaaaaatgctgattattcacaccgcc

SEQ ID NO: 4771 - DNA, 699 bp, Homo Sapiens
aaagtcatgtggttcagcccggcaggaatggggcacctctgcgttacaaaagatgggctgcgcttggaaggcgaaagtgaatttctctttcccctctatgcgaaggagattcactcccgcgtcgacagttctctcttgcttcagtccacccagaacgttacagtgaacgcgcggaactcagagggtgaagttacgggccgcttgaaggttggacccaagatggtcgaagtgcagaatcagcagttccagattaattctaatgatggaaagcctctctttacagttgatgaaaaggaggttgtggttgggacagacaagctgcgtgttactggccctgaaggcgccctgtttgagcacagcgtagaaacccccctcgtgagggcagacccattccaagacctgcgactcgagagcccgactcggagcctctctatggatgctcccaggggagtgcatatccaggcacatgcggggaaaatcgaggccctgagccagatggatatcttatttcacagttccgacggtatgcttgtgttagatgcagagaccgtgtgcctccctaaactggtgcaaggcacatgggggccgagcggaagctcccagtccctctacgaaatttgcgtctgtccagacggaaaactgtacttatcagtggccggagtttcaacgacttgtcaggaacacaaccacatctgcctt

SEQ ID NO: 4772 - DNA, 723 bp, Homo Sapiens
aaggtgatgaacttcaccgttgacggcatgggtaatttgagggttactaagaagggcattaggctggagggcattagcgagttcctgttgcctctgtatgtgaaagaaatccactccagaaaggacagccctctggttctccaatccgaccgcaatgtcacggttaacgccaggaaccacatgggacagctgactggccagctgacaattggagccgacgccgttgaggctcagtgtaagagattcgaagtgcgagcgtcagaagacggtagagtgctcttcagcgctgatgaggacgaaatcacaattggagctgaaaaactgaaagtgactggcaccgagggagccgttttcggtcacagcgtggagactccacatatacgagcagagccaagccaggacttacggctcgaatcccccaccagaagcttaatcatggaggcccctcgcggcgtgcaggtgtctgcagcagcaggagatttcaaggcaacctgtaggaaagaactgcatttgcaaagcacagagggcgaaatcttcctgaacgccgaaaccatcaagttgggaaacctgccaacggggagcttctcatcctcaagcccgagttcctcaagcagccgccaaaccgtatacgagctgtgtgtttgtcccaatggcaaactttatcttagtccggccggagtcggtagcacgtgccagtcaagctccaatatttgcctgtggagc

SEQ ID NO: 4773 - DNA, 231 bp, Homo Sapiens
gaggtttgtatggcatctcggggcttgtctctgttcccagagagctgccctgacttctgctgtggaacgtgcgacgaccaatattgttgtagcgacgttctgaaaaaatttgtatggtctgaagagaggtgtgccgtcccagaggcatctgtgccagcttccgttgagcccgtcgagcagttaggctcagcactgcggtttcgacctggctacaatgaccccatgtcagga

SEQ ID NO: 4774 - DNA, 447 bp, Homo Sapiens
gctcgaggaagagcagccaacagaacgctgtcagcaggaggggcagctgtcggtggaaggcgcgctggcggcgccttagcgagaggaggccgagagctgaacggcaccgcccgagcacctggcatacctgaggcaggtagtcggcgaggtcagcccgcagccgccgtagctgccgctgcatcagctgcagtcacctatgagacatgttggggctattacgacgttagcggacagtacgataaagagtttgagtgtaataactccgaaagcggatatctttattgttgcgggacatgttattataggttctgctgtaaaaaaaggcacgagaagttggaccagcgccagtgcactaactatcaatcccctgtgtgggtccaaactccaagcactaaagtcgtgagtccgggtcctgagaacaagtacgacccggagaaggacaagacc

SEQ ID NO: 4775 - DNA, 501 bp, Homo Sapiens
cgaccttcaaatgcaactagtgctgagcctgctggaccattgcccgctctcctggctcacctgcggcgcctcaccggcgccctgactggcggcgggggggccgcatctcccggagctaacggtacacgcacaggaccggctgggggggccggggctgcagcacgcgctccacccccagcagagctgtgtcacggctattacgacgtgatgggtcagtacgacgctacattcaactgcagcaccgggagttaccgcttttgctgcggaacctgccattatcgcttttgctgtgaacacagacacatgaggctggctcaggcttcctgttccaactacgacaccccgaggtgggcaactactcctccaccactcgccgggggtgccggcggcgctggcggggcaggaggaggacccggccctggacaggccgggtggcttgagggcgggagaaccgggggggccggtggccgcggcggcgaaggtcctggtggaagcactgcc

SEQ ID NO: 4776 - DNA, 300 bp, Homo Sapiens
ggggccccagaagctcagggccccgccgctcctggcaccaccgcacccgagggaggagaccgctgtcggggatattacgacgtaatgggccagtgggaccctccttttaactgtagtagtggcgcatactctttttgctgcggcacctgcggttatcgcttctgctgtcacgatggtcctcggcggctggaccaatctcgttgctccaattacgacacacctgcatgggtgcagacaggcaggcctcctgcaagagcccgggacacagcagccccaagagaccccggtagagagcggtca

SEQ ID NO: 4777 - DNA, 378 bp, Homo Sapiens
caggaaagggctggccatggccaactggctcagttggggggggtcctgttgttggcgggtgggaacagatctggtgctgctagcggtgaggccagcgagggagcagaggcttcagacgcccctccaactagggccccaacaccagacttctgccgtggctatttcgatgtgatggggcagtgggacccaccatttaattgtagtagcggggatttcatattctgttgtggcacctgcgggttccggttctgctgtaccttcaaaaagcgaaggctgaaccagtctacgtgtactaattacgatacacccttatggcttaacaccggaaagcctcctgctcgaaaagacgacccccttcatgatcccacaaaagataag

SEQ ID NO: 4778 - DNA, 1026 bp, Homo Sapiens
gaggaggaactccaagtgatacagccagataaatcaatttccgtagcagctggtgaaagtgctacccttcactgcactgtcacctccttaattccagtagggccgatccagtggtttaggggcgctggcccaggccgggagctgatctacaatcagaaggaaggccattttccaagagtcacaaccgttagcgaccttacgaagcgaaataacatggattttagtatcaggatcagcaatatcactccagcagacgccgggacatattactgtgtaaagtttcgaaagggatcaccggaccacgtagaattcaagtctggcgctggtactgagctgagtgtgagagcaaagccaagcgcacctgttgtatccggccccgccgctcgggctaccccccagcacaccgtgtcatttacgtgcgagtctcacggatttagccctagggacataaccctgaaatggttcaaaaatggaaatgaactttcagactttcagacaaacgtggaccccgcaggtgacagtgtgagctactccatccacagcaccgcgaaagtcgtgctcactagggaagacgtccactctcaggtaatatgtgaggtcgctcacgtaactctgcagggcgacccactgcgggggaccgctaatctgagcgaaaccattcgcgttcctcctaccttggaggtgacccagcaacccgtgagggctgagaatcaggttaatgtcacttgtcaagtaaggaaattctatccccagaggctgcagctgacttggctcgaaaacggtaatgtatctcggaccgagactgccagcacgctgacggagaataaggatggcacgtataattggatgtcttggttattggtgaatgttagtgcccatcgcgatgatgtgaagctgacttgtcaggtagagcacgatggtcagcccgctgtgtctaagagtcacgacctgaaggtgtctgcccaccccaaagaacagggaagcaacactgctcccgggccggctcttgctagtgctgctcctctt

SEQ ID NO: 4779 - DNA, 327 bp, Homo Sapiens
ttagagaatttcgcggcagctatcccaggccaccgatgttgggtgcacatgttagataacaacaccggttccggcaacgaaactggcatcctttcagaagatgctctcctcaggatttccattcctctggacagcaaccttaggcctgagaaatgcagaaggtttgtgcacccccaatggcagctgctgcatttgaatgggacaattcattcaacatctgaggcggacaccgagccctgtgttgacgggtgggtttatgaccagtcttactttccaagcaccatcgtgacaaaatgggacctcgtatgtgattaccagagcttgaag

SEQ ID NO: 4780 - DNA, 291 bp, Homo Sapiens
atggtccttgacgaaccccatcactgcgccgtggcctgggtcaaaaatcacacatttaatctttcagcggctgaacagctggtcctgtccgtcccactggataccgctgggcaccccgagccatgtctgatgttcaggccgcctcctgctaacgcgagtttacaggacatcttaagccaccgatttaacgagacacaaccgtgtgacatgggctgggagtatcctgagaaccgcttaccctccttgaagaacgagtttaacttagtctgtgatagaaagcatcttaaggac

SEQ ID NO: 4781 - DNA, 321 bp, Homo Sapiens
ggcttcacacccgatcataggtgccgtagtccaggggttgctgaactgtcattaaggtgtggctggagccctgcggaagagctgaattacacagtacctggacccggaccagcaggggaagcttctccacgacaatgtcgtcggtacgaggtggattggaaccaatctactttcgactgtgttgacccccttgcttcattagatacgaaccgctctcgcttacctcttgggccctgtcgggatggctgggtgtatgagactcccggctccagtattgttacagaatttaatctggtgtgcgctaacagctggatgctggat

SEQ ID NO: 4782 - DNA, 279 bp, Homo Sapiens
ccaccgcaccactgtcgaggccctgcgaatcatacagaagcaagcacgaatgactcaggagcatggctccgcgctacaatcccccttgatcagctgggtgccccagagccctgccgccgattcactaaaccacagtgggccctgttatcccccaatagctctattccaggagctgctactgaaggctgtaaggatggttgggtatacaacaggtctgttttcccctctaccattgttatggaatgggatctcgtgtgcgaggctcgaacactcagagac

SEQ ID NO: 4783 - DNA, 345 bp, Homo Sapiens
gtgtatcaccagacacagttagagaattttgccgcattcatactggaccataggtgctgggtacacattctcgacaacgacaccatcccagacaatgatcctggcactctgagtcaagatgctcttcttaggatctcaattccgttcgacagcaatttgcggcctgaaaagtgtcggaggttcgtccatccacagtggaaattgattcaccttaatggcacctttcctaacacaagcgagccagataccgaaccctgcgtagatggttgggtctatgatcagtcttcatttcccagcacaatcgtcacaaagtgggatttggtctgtgaatcccaaccactgaat

SEQ ID NO: 4784 - DNA, 252 bp, Homo Sapiens
cagcccgcccctcattgtcgcccagatcccacactcctgccacctgcactccgggctttgcgcggccctgccttactggacgcggctatacctagactcggaccaacacgggcccctgccgaggccctgggcgtcttaagcccttcttatctggcccctttgaccagggctcctagacctagctcctgggcttcctgcagcggagccgctgccgggccgacttggaacctggtgtgtggggacggatggaag

SEQ ID NO: 4785 - DNA, 201 bp, Homo Sapiens
aatgcccctcagcaggtgatcatttcacattataggcatgtactgggcgtccccctggatgatcggaaggcaataaataactacgtgattaatagtaccgacgaactcccaaccatttcatactccatgaatccgaaacccacaccgtgggcagaggaggagacagtggcggctgcacagctgattaccatgctgtggtct

SEQ ID NO: 4786 - DNA, 339 bp, Homo Sapiens
gaatctgcgaccgcacttttggaaagactgagcgaactggcgctcggcgccgcctccctgaccccccgagcccaggcaccagacatcctcaaggtcctcacaaagcccctgacacatctgatcgtacaactcgactccgatatgatcatgtcaagcgccactggcaacgcaacaaatagcagcttgattaagcactggtgtggtactacaggtcaaccaacccaggaaaacagctcttgcggagcctttgggccatgtactgagaagaactctaccgctccggccgatagactcccgtgtaggcacctgtttgctgggactgagttgacagacctcgcc

SEQ ID NO: 4787 - DNA, 312 bp, Homo Sapiens
atggaccccatggagcttagaaatgtcaacatcgagcctgacgacgagtcttcatctggtgagagcgcaccggactcatatatcggcataggcaactctgaaaaggctgccatgtcatcccagtttgcgaacgaggacaccgaaagccagaagttcctcaccaacggttttctggggaagaagaagcttgccgattacgccgatgaacaccaccccggcactaccagctttggaatgagcagctttaacttgagcaacgcgatcatgggttccggaattctgggactgtcttacgccatggcaaacactggc

SEQ ID NO: 4788 - DNA, 357 bp, Homo Sapiens
tcttcctgggaggtaagcgagagaattcgggagtgtaattattaccagaacctggccgtgccgcagggcctcgaataccagaccaatgagccaagcgaggaacccatcaagaccatccgcaattggctcaaggaaaagctgcatgtcttttccgaaaagttggaggaggaagtgcaacagttggaacagcttgcctgggatctcgaattgtggttggatgcccttctcggggaaccacaccaggaggagcactgctccacctacaaatctcacctgtgggagtgggcatgggcgctgggccgagaacacaaaggcggcgaaggcctgttagagatcagtctgagcggagctgagctg

SEQ ID NO: 4789 - DNA, 1239 bp, Homo Sapiens
gagccgggaaagttttggcatatagccgatctgcatctcgatccagattataaggtgtctaaagaccctttccaagtgtgtccttccgccggatcccagcctgttccagacgccgggccatggggagattacctgtgcgactcaccgtgggcgctgatcaacagttctatctacgcgatgaaagagattgagccggagccagattttatcttgtggacgggcgatgacactccacatgtccccgacgaaaagcttggcgaagctgccgttctggaaattgtggaacggttgacaaagttgatacgcgaggttttccccgacacaaaagtctatgcggccctgggcaaccatgatttccatcccaaaaaccagttccctgccggcagcaataatatatacaaccagattgcggagttgtggaaaccttggctgtccaatgagagcattgccctgttcaagaaaggcgcattttattgtgagaagctgcctgggccctccggtgccggacgaatagtggtgctcaatacaaatttgtactataccagtaacgcattgaccgctgatatggctgatcctgggcagcagttccagtggcttgaggatgtgctgacagacgcaagcaaggccggtgacatggtgtatatagtcggccacgtaccacccggcttcttcgagaaaacccagaacaaggcatggtttcgggaagggttcaacgagaagtacctcaaagtcgtgcggaaacaccacagagtcattgcaggacagtttttcggtcaccatcacaccgacagcttcagaatgctttatgacgatgccggcgtgccaatttctgccatgttcatcacacccggagtgacgccctggaagactacactgcccggagtagtgaatggggccaacaaccccgctattagagtcttcgagtacgacagagccaccctgagcttgaaggacatggtgacctactttatgaatctctctcaggccaatgcccaaggtacccccagatgggaactggagtaccagttgaccgaggcctacggggtgcccgacgccagtgcgcattctatgcacaccgttctcgaccgcatcgcaggggatcagtctaccctgcagcggtactatgtgtacaattctgtctcttactccgctggcgtgtgtgatgaggcttgcagcatgcagcatgtgtgtgccatgcggcaggtcgacatcgatgcatacactacctgcctgtatgcc

SEQ ID NO: 4790 - DNA, 1596 bp, Homo Sapiens
gccgtcctcgggttcctgcaggagcacggcggcaaagttcgcaacagcgagcttttgtccaggtttaaacccctcctggacgcaggtgatcctcggggtagggccgctcgccgggaccgcttcaaacagtttgttaacaacgtcgccgtggttaaggagctcgacggcgtgaaatttgtcgtgcttcgcaagaagccacggcccccagagccagaaccagcccctttcggccctcccggagcggccgctcaaccttctaagcccacatccacagtgctgccgcggtccgcatctgcccccggcgctccccccctggtccgcgtaccccgacccgtggagccaccaggcgacctgggactgcccaccgagcctcaggacactccaggcggaccagcgagcgagcccgcacagccacctggtgagcgtagtgctgaccctcccctgcccgcactggagctggcccaggcaacagaaagacctagcgctgacgccgcacccccccctcgtgctccttcagaagctgccagcccatgctctgatcctccggacgccgagcccgggcctggagccgcgaagggtcctccacagcaaaaaccttgtatgctgccagtccgttgtgtgcccgcccccgctaccttacggctccgcgcagaagagcctggattgcgcaggcagctctccgaggagcctagcccaaggtcatctccactgctgttacgccgtctgtccgtcgaggagtcaggcctgggtctgggtctcgggcccggcaggtccccacatctgaggcggctctcccgcgccggaccacgcttgctcagcccagacgccgaagaactgcctgccgcgccacccccaagcgcagttcccctggagccaagcgagcacgagtggttagttcgcaccgctgggggaagatggacccatcagctccatggcctcctgctgcgtgatcgagggttagctgcgaaaagagattttatgagcgggttcacggccctgcattgggcggccaaatccggtgatggtgagatggcccttcagttggtcgaggtggcccgtcgttcaggggctcccgtcgatgtcaatgcacgaagtcacggcggctacactcctctgcacctggccgcattgcatgggcacgaagacgccgcggttcttttagttgtacgactgggtgcacaggtgcatgtccgcgaccactccggccggcgtgcgtatcaatatctgcggccaggttcctcatatgcattacgacgcctgctcggagaccctgggctcaggggaaccaccgagccagatgccaccgggggaggcagcggctccttggcagctagaaggccagtgcaggtcgccgccacaatcctttcaagcactacttcagctttcctcggcgtgctggccgacgacctcatgctgcaagacttagccagaggcctgaagaagtcctcatctttcagcaagtttctgtctgcttccccgatggcccctcgcaagaagactaagattcgcggcggccttcccgcttttagtgagattagcagaaggccaacaccaggacccctggccggactggttcccagcttcccccccaccaca

SEQ ID NO: 4791 - DNA, 414 bp, Homo Sapiens
aaaatttacgagcgctgtgagctggcagcaaggttagaacgggctggcctcaatggctacaaaggctatggagtaggcgattggctctgcatggcccactacgagagtggattcgataccgcttttgtggatcataatcccgacgggtccagcgaatacggcatttttcagttaaacagtgcttggtggtgcgataacggcatcacccccaccaagaacctctgtcatatggattgccacgacctcctcaacagacacatcctggatgatattcgctgtgccaagcagatagtcagtagccagaatggcctgtcagcctggacaagttggcgactgcattgttctggccacgacctgtcagagtggctgaaaggatgcgatatgcatgtgaagatagatccgaaaatccatccc

SEQ ID NO: 4792 - DNA, 513 bp, Homo Sapiens
aggccgcgaactgtaatccctggctcaccaacagaaataccattctcctccaaacaggaggacatgtccgagctgcttgatgagatattagtgcaggaaatccttgaccttaataagaccacccctagtgagatgccctctactgccagcacattaagtacccccctgcacgccggaattgatgagaactaccaggccggcgggagtgaaaactatcacgaactgctggaaaaccttcagttttcaccggggatagaggtcaagatcagcaatgatgaagcaaatgccaatgctaatcttcacggggatcccagcgaaaactataggggtccgcaagtcagcccaggatccgaaaagtcagttagctccaaagaaaagaattcaaaaaatactcagtacgaaaacttatctatcctcgatcaaattttgcagaatattgggcgctcttccggtaacatttttcataaagaacagcagcgtaccagcgcccagcggaggagccagggtagtcag

SEQ ID NO: 4793 - DNA, 294 bp, Homo Sapiens
aggcatgtgaaccacagtgccaccgaggctctcggagaactgcgggaacgggcccccggccagggcacgaatggattccaactgctgagacacgcggtgaaacgggatctcctccctcctcgaactcctccataccaggttcacattagccatcaagaggccagaggcccttctttcaagatttgtgttggtttcctcggcccgcgatgggcccggggctgttctacaggcaatgagaaatatcacttaccttacgccgcaagggacctccagacattctttttaccattttgg

SEQ ID NO: 4794 - DNA, 234 bp, Homo Sapiens
cgacatgtgaaccattccgctacagaggctttgggagagttaagggaaagggcaccagggcagggtactaatggtttccagctgcttcgccatgcagttaaacgagatctcctccctccccgcacacctccataccaggtgcacatcagtcatcgggaggcaaggggcccgagttttaggatttgcgtcgacttcttaggcccacgttgggcacgcggctgctctacgggaaac

SEQ ID NO: 4795 - DNA, 858 bp, Homo Sapiens
gcacctcagcaggaggctcttccagacgagaccgaggtcgtggaggaaaccgtcgctgaagtgactgaggtgagcgtcggggctaaccccgtgcaagtggaggtcggtgagtttgacgacggagccgaggagacagaggaggaggtggtcgcggaaaacccatgccagaatcatcattgtaaacacgggaaagtctgcgagctggatgaaaacaacacccctatgtgcgtctgtcaggatcctacttcatgcccagcccccattggtgagtttgagaaggtctgctctaacgataacaagaccttcgactcctcttgtcactttttcgctactaaatgcaccctcgagggcactaaaaaagggcacaaactgcatctggattatatcgggccctgtaaatacataccaccctgcttagacagcgagctgacagaatttcccctgcgaatgagggactggctcaagaatgtgttggttaccctttacgagcgggacgaagataataatctgcttacagagaaacagaaactgcgggtgaaaaagattcatgaaaatgagaaacgcttagaggcgggggaccaccccgtggagctgctggcacgcgattttgaaaagaattataacatgtacatcttccccgtgcattggcaattcgggcagctggaccagcaccctattgatggctacctctcacacactgagttggcacctctgagagcgcccctgattccaatggaacattgtacaaccagatttttcgagacatgtgatctcgataacgacaaatatatcgccctcgacgagtgggctggatgttttggcattaagcagaaagatatcgataaggatctggtgata

SEQ ID NO: 4796 - DNA, 228 bp, Homo Sapiens
attgacttcccactgccaatggcttcagagcggggacagctcgataagactattgttgagtgtcttaagaacgttaacaagtgctggttcctgtcctatattaagccgagtgagcccatctgtggttcagaccaagtgacctattcatcagattgtcacctgtgttctaagattctgtttgaaggactgaatattaccaagctgtacgacggccaatgcgagaattct

SEQ ID NO: 4797 - DNA, 225 bp, Homo Sapiens
ggggttaataagatcgctgagaaaatctgcggggacctgaaggatccatgcaaacttgatatgaactttggcagctgctatgaggttcacttccgttacttttataatagaacaagcaagcgctgcgagacatttgtctttagcggctgcaacggcaatctcaacaattttaaattgaaaatcgagcgagaagtcgcctgtgtcgccaagtataagcccccgagg

SEQ ID NO: 4798 - DNA, 915 bp, Homo Sapiens
caaccactcgggggcgagagcatctgcagcgcacgcgcactggccaaatattcaataacatttacaggcaaatggtcacaaaccgcctttccgaagcagtaccccctgtttagaccgccagcacagtggagtagcctgctgggcgccgcacacagttcagattatagtatgtggcgtaaaaatcagtacgtaagcaacggactgagggattttgcagaaaggggggaggcgtgggctcttatgaaggagatcgaggctgctggtgaagctctgcagtccgtgcatgaggtatttagcgcccctgcggtccccagcgggactggccaaacaagcgcggaactcgaagtgcagcggcgacactccctggtaagcttcgtggtgaggattgtgcccagcccagactggttcgttggtgtagattccctcgacctgtgcgacggagatcggtggagggagcaggcggcccttgacttgtatccttacgacgcagggaccgacagcggcttcacattttcatctcctaactttgcgaccatcccccaagatactgttacagaaattacctcctcaagtccaagccaccctgctaattcattttactatcctcgccttaaagcactccctcccatagcccgagtcactctcgtaaggcttagacaaagccctcgggcattcatacccccagcccccgttctccccagcagagacaatgaaattgtggactcagcctctgtccccgaaacccctctcgattgcgaggtaagtttgtggagttcatgggggctctgtggaggccattgtggtaggttgggtacaaaatcccggacacgctatgtaagggtgcaacccgctaacaatgggagcccctgcccagagctggaagaagaagcggagtgtgtacccgacaattgcgtg

SEQ ID NO: 4799 - DNA, 546 bp, Homo Sapiens
ttcccagtgtacgattatgatcctagcagtttaagggatgccctgtccgcaagtgtcgtgaaggttaactcacaaagcttgagcccatacctgttccgggccttcaggtcttccttgaagcgcgttgaggtgttagacgagaataaccttgtgatgaatctggagttctctatcagggaaactacatgcaggaaggattccggcgaagatcctgccacttgcgctttccaaagagactattatgtttccactgctgtctgtcgaagcacagtgaaagtgtccgcccagcaagttcaaggagtgcatgcccgctgtagttggagtagcagcacaagcgagagttacagctccgaagaaatgatcttcggcgacatgttgggatcccataagtggagaaacaattatctgttcggcttaattagcgatgaatctattagtgaacagttttatgaccggtccttgggcattatgcgacgggtgctccctcctgggaaccggcgataccccaaccatcgccaccgggcccggatcaacactgactttgag

SEQ ID NO: 4800 - DNA, 246 bp, Homo Sapiens
ctcgctaccgaggccggtcagaagccgtccctccggggattgttagacgtcggaaacatccaacacagggccgctcgggcaaggggcttaaccaggggagtgatcagggtcagcccccaggaaaggagtcagcaaaaccagtccgcccctaaaggcccaaccccgtctacaagacccaagcccaggaccctcggacctcaggcacacagcctggcgttgcagagcgtggatctgctgttccgcccc

SEQ ID NO: 4801 - DNA, 486 bp, Homo Sapiens
atggagagcctctctgagctgcagaacccactcctgcctcggtccccggctcatttgcatgggccttatccctatcccgagacccccccttcatggtcttgtcaggagaagctgtactcctatctgcttggaggggctggccctgccggcgctcaccagcttctggatccgggttcacttcagctcgccgtggaagcatggtacaggcctagctgcctcctggggcgggacaaggtgaaagagccccgtgctggaagttgtgaaaccagctttaccgaagacagggagcctcaggaaggccctccggagcagcccacgggaccaggtcaggctgccgaaaatgttactatacaaacggtatcctatggggttcaagaggagctgagggaccaggaggacgatcaggaagaagaggagagcgacgcaacttcaaccgagtcagagagcgaggacaactttttaacattgcccccacgggatcacctt

SEQ ID NO: 4802 - DNA, 249 bp, Homo Sapiens
aactggctcgtaaagtacgaacacaaactcaccctgcctgagccgcagcaggacgagatactgcaacgcttactgttctctgaaatgaagatgaaagtactggaaaatcagatgttcataatctggaacaaaatgaaccaccacggacgcagctctaggcaccggaattttcccatgaaaaagcaccgcatgcgtagacacgagagcatttgcccgacgctctcagactgcacctcatccagtccttcc

SEQ ID NO: 4803 - DNA, 828 bp, Homo Sapiens
gatagcgaggaagatgaggagcataccatcatcaccgatacggaattgcctcccttaaaactcatgcactccttttgcgcttttaaagcagacgatggaccctgcaaggccataatgaagcggttttttttcaacatattcactcgccaatgcgaagaattcatctacggcggttgtgaaggaaatcaaaataggttcgagagccttgaggagtgtaagaagatgtgcacccgagataacgccaatcgtattataaagaccactctgcaacaagaaaagcctgacttctgctttctcgaagaagatcctgggatctgccggggttatatcaccaggtacttctacaataaccagacaaagcaatgtgagcgcttcaagtacggcggatgcttgggcaatatgaacaattttgaaacgctggaggaatgcaagaatatttgcgaagatggaccaaatggttttcaagtggacaattacggtactcaactcaatgccgtgaataattcactgactcctcagtccactaaagtgccatcactcttcgagttccacgggccatcttggtgcctgactcctgctgaccgaggattgtgcagagcaaatgagaatcgattctattataatagcgtgatcggaaaatgccgccctttcaagtattccggatgcggcggaaacgagaataacttcactagcaaacaggagtgtttgcgggcctgcaaaaagggctttatacagaggatatctaagggcggccttatcaaaactaaaaggaagaggaagaaacaacgggtcaaaatcgcctatgaagagatctttgttaagaatatg

SEQ ID NO: 4804 - DNA, 804 bp, Homo Sapiens
atgggcgaatctgctgccgcaacagcgtccttgtttcagaggagaagaaggggaagagggggaagagtgacattccctgggggattgaagggcagtgcacgattcctttccttcggacccccatttcctgctccacctgcacctccgttccctgctgcccctgggccgtggctgcgaagaccactgttttctctcaaattgagcgatactgaggatgtgtttcccaggcgtgcaggccctctggaggtcccagccgatagcagggtattcgtgcaggccgctctcgcccggccatcccccaggtggggtctggctttacatcgatgctccgttacgccctccagtcgccccgctcccggccctgccctggcactgctgagagaggggtgcccagcagatacctccgtcgcctttccaccgcctcccccccccagccccggtgctgcccgacccgcccggtttagttttcgtctgcgtccagtgttcaatgccagcgttcagttccttcattgtcagttgtcaaggtgtcgccgcctccgtggcgttagacgggcgcccgccccgttaactcctcctccacctccccctccatctcgatgtttaccccaggacgaagcgtgcgccgataccggttccgggtccgctgaaggtcttgcagccgacggcccccaccttcacacactgacccaacctatagtcgtgaccgtgccacgtccgcctccccgccctccaaaaagcgtgccaggacgggctgtgcgccccgagcctccggcccctgcgcctgcagcactggaacccgcccca

SEQ ID NO: 4805 - DNA, 573 bp, Homo Sapiens
ctcctcgatgtatggtacctcgtcagattaccatgtgccgtactccgcgcgcggctcctccaacctcgagtgcgggacttgcttgcggagcagagattcccgggccgggtcctgccatccgacctcgacctgttacttcacatgaataacgctcgctacttacgggaggccgatttcgcaagggtggcccacttaaccagatgcggtgttttaggcgcactgcgggaactccgagcgcacaccgtgcttgccgcttcctgtgcacgtcatcgcaggagtctccggctgctggaaccattcgaagtcagaactaggcttttaggctgggacgacagggcattctacctggaggcaaggtttgtctcattacgtgatggcttcgtgtgcgccctcctgcgatttcggcagcacctgttgggcaccagccctgaaagagtcgtccagcacctgtgccaaaggcgcgtcgaaccccccgagctcccagcggacctccagcactggatcagctataatgaggcatcttctcaattactccgcatggaatcaggcctcagcgacgtgactaaggaccag

SEQ ID NO: 4806 - DNA, 1452 bp, Homo Sapiens
atgtggtacgttagcacaaggggcgtggcccctcgcgtgaactttgaaggtgcgctgtttagtggttacgcacctgacggaggattatttatgcctgaagagctgccccagcttgacagggggaccttgtgccagtggagtaccctgagctatcctggcctggtgaaagaactgtgcgcactcttcataggaagtgagttgttgcctaaagacgaactcaatgacctgatagaccgtgcgttctcacgcttccggcaccgcgaagtagtccacctgtcaaggctgcgcaacgggcttaatgtgctcgagttgtggcacggggttacttacgcattcaaggacctcagcctgagctgtactacacagttcctgcagtactttcttgaaaagagggagaagcatgtcaccgtcgtggtgggcacatccggagacacgggctccgcggcgattgaatccgtgcaaggagcaaagaacatggacattattgtactcctgcccaaggggcactgtaccaagattcaggagctccagatgacaaccgtgctgaagcagaacgtgcatgtcttcggggtggaaggaaatagcgacgaattagatgaacctatcaagactgtgttcgctgacgtggcttttgtcaaaaagcacaacctgatgtccctcaactcaataaattggtctagggtgttggtccaaatggctcatcatttcttcgcctactttcagtgcaccccttccttggacacccaccccttgccactggtcgaagtcgtagtgcccaccggcgcagcagggaatttggccgccggatatattgcacaaaagatcggcctgcccattaggttagtggtcgccgtcaatcgaaacgatatcattcacagaacagtgcaacagggtgatttctccctgtccgaagcggtcaagagcaccctggcaagtgcaatggatatacaggttccttataacatggaacgggttttctggctgcttagcggcagcgattctcaggtgaccagggccctcatggagcagtttgagcggacgcaaagtgtcaacctccctaaagagctgcatagtaagctgtcagaagcagtcaccagcgtaagcgttagcgacgaggcgattacacagaccatggggcggtgctgggacgaaaatcaatacctgctgtgtccacactccgccgtggcagtcaattaccactaccagcaaatcgatcgccaacagccaagcacaccccgctgctgtctggctccggcatctgcggccaagttcccagaggccgtcctcgcagccgggctgacccccgaaacccccgccgagatagtagccctggaacacaaagaaacaagatgtacactgatgcggaggggggataactggatgctgatgctccgggacacgatcgaggacctgagtcgtcagtggcggagccacgccttgaatacatcccag

SEQ ID NO: 4807 - DNA, 996 bp, Homo Sapiens
agtcccgcacctcctgcctgtgacctgcgggtgcttagcaagctgctgcgggactctcatgtgctccattctcgcttatcccagtgtccagaagtgcatccgctgcccaccccagtattgttaccagccgttgatttttctttgggcgaatggaagacgcaaatggaagagacaaaggcccaggatattctgggtgctgtgacattgcttcttgaaggggtgatggccgcaaggggccagctgggtccgacttgccttagctctctcctcgggcaactctcaggacaggtgcggctgctgctgggagccctccagtccctccttggcacgcagctgcccccccagggcaggacgactgctcacaaggatcccaatgcaatcttcctgagttttcagcacctgctccgaggcaaagtccgcttccttatgttggtggggggttccacgttgtgcgtgaggcgcgcgcctcctacaactgccgtcccgtccaggacctctctcgtcctcaccttgaacgagcttcccaacagaacctcagggttactcgaaaccaactttacggccagcgcccggactactggcagcgggctgttgaagtggcagcaagggttcagggctaagatccctggtctgctgaatcaaaccagccggtcccttgatcagatccccggctacctgaaccggattcatgaattgctcaacgggactcgagggctgttccccggcccttcccggcgaactctgggagcccccgatatctccagcgggacgtccgatacaggttctttacccccgaatctgcaacctggatactcacccagccctacacaccccccgacgggtcagtatactctcttccctttgccacctactctccctaccccagttgtgcaactccatccattacttcctgacccctcagcccccaccccaactccaaccagtccactgttaaacaccagctatactcatagtcagaacctctcacaggaggga

SEQ ID NO: 4808 - DNA, 822 bp, Homo Sapiens
gctgaggtctttgggaattccagtgaggggctgattgagttctctgtaggcaaatttcggtactttgagttgaatagaccttttcccgaggaggcaatcctgcacgacatttcaagcaacgtgacatttctgatcttccaaattcatagtcagtatcagaacactacagtttctttctctccaactctgctttcaaattccagtgagacaggaaccgcatccgggcttgtctttattcttaggccggagcagtccacttgcacgtggtatctgggcacttcaggaattcagcctgtgcaaaacatggccatcctgctgtcctatagtgagagagaccctgtccctgggggatgtaacctcgagttcgatcttgacatcgacccaaatatatatctggagtataacttcttcgagacaactatcaagttcgccccagcaaacctggggtatgcgagaggcgtcgaccctccaccctgtgacgctgggacagatcaagactcccgatggagactccaatatgatgtgtatcagtattttctccccgagaatgacctgacggaggaaatgctgctgaaacacttgcaacgtatggtgtccgtgccccaggtaaaagcgtctgcgctgaaagtagtgaccctcactgctaacgataagacctctgtgagctttagtagcctgcccggtcaaggggtgatctataacgtgatagtgtgggacccttttctgaatacgtctgccgcttacattcctgcccacacctacgcctgtagctttgaggccggggaagggtcctgtgcctccttagggcgagtgagtagtaaa

SEQ ID NO: 4809 - DNA, 585 bp, Homo Sapiens
gatgagcatgaacacacataccaagataaagaggaagtcgtcctctggatgaacacagtgggcccatatcacaataggcaggagacatacaaatatttctccctccctttctgtgtggggtcaaagaaatctatttcccactatcacgagacgctcggtgaggcactccaaggagttgaattggaattctctggcctggatattaaattcaaagatgacgtgatgcccgccacttattgcgaaattgatctcgataaagagaaacgagacgcgtttgtctacgccatcaagaaccactactggtatcagatgtatatcgacgaccttccaatctggggcattgtcggggaggccgacgagaacggggaggactactacctctggacatataagaaattggagataggatttaacggcaatcggattgtggatgtaaatcttacgtccgaaggaaaggtgaagctggttcccaatacaaagatccagatgtcctatagcgtgaagtggaagaagagtgacgtgaagtttgaagacaggttcgacaagtacctggaccctagctttttccagcatcgtatccactgg

SEQ ID NO: 4810 - DNA, 213 bp, Homo Sapiens
aggtccgtacctcttaaagcaacctttctcgaggatgtcgccgggagcggcgaggctgagggttcctcagcttcatccccctcactcccccctccgtggacgccggccttgagcccgacatccatgggccctcagccaatcactctgggtggaccgagtcctcctaccaattttcttgatggaattgtggatttctttcggcagtatgtgatg

SEQ ID NO: 4811 - DNA, 405 bp, Homo Sapiens
atgcagcctcctccacccggaccactgggcgattgcctgagagattgggaagatttacaacaggattttcaaaatatacaggaaacccaccggctgtaccgacttaagttggaagaattgactaaactgcagaacaattgtaccagcagcataaccaggcagaaaaaacggctgcaagaattggcattagcgcttaaaaaatgtaagccatctttacctgctgaagccgagggcgctgcccaggaactggaaaaccagatgaaggagagacaggggctgttcttcgatatggaggcttacctgcccaaaaagaatggcctttatctcagcctggtactgggcaatgttaatgtaactcttctgtccaaacaagccaaattcgcatacaaagatgaatacgaaaaa

SEQ ID NO: 4812 - DNA, 558 bp, Homo Sapiens
aagacccctaaggaacgcactttggagctgagctgcctggaggtttgtctccaatccaacttcacttacagccttagctcacttaatttctcctttgtgacattcctgcagccagtgagggagacacaaataattatgcggatcttccttaacccatcaaatttccgtaattttacccgcacttgtcaagatattaccggagaattcaagatgtgtagcagctgtctcgtttgcgagtccaagggaaatatggatttcattagccaggaacagactagtaaagtgttgatacgccgcggctctatggaggtaaaggctaacgacttccacagcccctgccagcacttcaactttagcgttgccccactcgttgatcacctggaggaatacaacacaacctgccacttgaaaaatcataccggccgctctaccatcatggaggatgagccaagtaaggagaagtcaatcaactacacatgcaggatcatggagtatcccaatgactgcatccacatcagccttcacctcgaaatggacatcaaaaacatcacatgcagt

SEQ ID NO: 4813 - DNA, 630 bp, Homo Sapiens
ggcgccgctgacgctccagggctcctgggcgtcccaagcaacgcatcagtgaatgccagttctgcagatgagcccattgctccacggctccttgcctctgctgcaccgggcccgccagagcgcccaggaccagaggaagccgccgccgccgctgctccatgtaacataagtgtgcaacgacagatgctgtcttctctcttggtgagatggggaagaccacgcggctttcaatgcgatcttttactcttcagtacgaacgcacacggccgcgctttctttgcggctgcgttccaccgcgttgggccccccctcttgatcgaacacctggggctggcagcaggcggagcgcaacaggacttgaggttatgtgtggggtgcggctgggtgcggggtcgtcgtaccggtcggcttaggcctgctgctgcccccagcgccgccgccgcaacagccggtgcacccactgcccttcccgcctatcccgctgctgaaccccccggccccttgtggctgcagggagagccattgcatttctgttgcctggacttctctctcgaggaattgcaaggagagccgggctggcggctcaacagaaaaccgatcgagtctacattggtggcctgcttcatgacc

SEQ ID NO: 4814 - DNA, 462 bp, Homo Sapiens
atctttacagatcactggtacgagaccgatccccgacgacacaaggaatcatgcgaacgttccagggccggagcggaccccccagaccagaaaaataggttaatgcctttatctcacctgccgctgagggactcccccccactggggcgacgcctgctgcccggcggaccaggccgggctgatcctgagtcctggcggtctttactcgggctcggcgggcttgacgccgagtgtggccgtccactttttgcaacttatagcggcctctggaggaaatgctactttctggggattgaccgggacatcgataccctgatcttgaagggtattgcgcagaggtgcaccgccattaagtaccattttagtcagcccatccgtctccggaacatacccttcaatctcacaaagactatccaacaggatgaatggcacctcctccacttgagaaggatcactgcaggt

SEQ ID NO: 4815 - DNA, 444 bp, Homo Sapiens
gtcgccatctgtagcgaccactggtacgaaactgacgcacggaagcaccgtgacaggtgcaaagctttcaatacccgccgcgttgatccaggcttcatttacaataataacaacaaccttcctctgagagccagcaggagcaggctggatcgatgggaaggaaaacttctccgggcaaggaaccggagacagttgttcgcaatgtctcccgccgacgagtgttcacgacaatacaacagcaccaatatgggtctctggagaaagtgtcatcggcagggatttgaccctgaaattgctgctctgattagaaaaggagagattgagcggtgcacatacatcaagtaccattactcctctgcgacaataccaaggaacctgacttttaatatcaccaagacaatcaggcaggacgagtggcacgcgctgcacttacgacgcatgact

SEQ ID NO: 4816 - DNA, 648 bp, Homo Sapiens
taccgaacgattacggacttccgcgaaaaattaaagcaccctgtgatgtctgttagctataaagaggtggacagatatgacgctcccggcatcgctctgtacccaggccaggcacagcttctgtcctgtaagcatcattatgaggtgataccgccactcaccagcccaggtcaacccggagacatgaactgtactacccagagaatcaactacactgatccgttcagtaatcagacagttaagtctgcacttatagtgcagggacctcgggaggtgaaaaagcgggagttagtttttctccagttccgactgaataaaagctctgaagacttttcagccatagattatctcctctttagcagttttcaagagtttctccagtctccaaatagggttggttttatgcaggcatgcgagtccgcgtactctagctggaaattttctgggggtttccgcacctgggtgaaaatgagtttggttaagaccaaggaggaggacggcagagaagccgttgagttcagacaagaaacatcagtcgttaattacatcgatcaaaggcctgcggctaaaaaaagtgcccaactgtttttcgttgttttcgagtggaaagaccctttcattcagaaggtgcaagacattgtgacggct

SEQ ID NO: 4817 - DNA, 498 bp, Homo Sapiens
agctttttactcactcatcgaacaggcctccggtccccagatattcctcaggattgggtctccttcctgcggtctttcggacagctgacgctctgccctcggaatggaaccgtgaccggaaagtggcgaggctctcacgtcgttggactgttgacaactctcaacttcggagacggcccggaccgcaacaaaaccagaacttttcaagccacggttctgggcagccaaatggggttgaaggggtccagcgccggtcagcttgttcttattaccgccagagtgacaactgaacgaactgccgggacttgtctgtacttcagtgccgtgccaggaattctgccatctagccaaccaccgattagttgctcagaggaaggagccggaaatgcaaccttgagtcccaggatgggagaagagtgtgtctcagtttggtcccacgaggggttggtcctgaccaagctgctgacatccgaagagttggccctctgcggttcccgt

SEQ ID NO: 4818 - DNA, 201 bp, Homo Sapiens
gactattggtacatcttggaagtggccgacgccggaaacggttctgcttggccgggaagggccgaactgctttctagtcattctgggttgtggaggatatgcgaaggacagaacggatgtatccccttggtggacccattcgctagtgagtcactggacgtctctacttcagtgcagcatctcatcctgctccatcgagca

SEQ ID NO: 4819 - DNA, 207 bp, Homo Sapiens
aacaagtccagtgaggacatccgttgcaaatgcatttgccctccctaccgtaacatctccggacacatttacaaccagaacgtcagtcagaaagattgcaattgcctccatgtagtagaaccaatgccagtgccgggacacgacgtcgaagcatattgtcttctctgtgagtgtagatatgaagagcgcagcacaactaccattaag

SEQ ID NO: 4820 - DNA, 291 bp, Homo Sapiens
atggactccccctctctcagggaactgcaacagcctctgttggaagggacagaatgtgaaacacccgctcagaaacctggtcgtcatgagctcggttctccactccgggagattgcattcgccgagagcttgagagggcttcagtttctcagccccccactgccttcagtcagcgccggactgggggaaccaaggccgcctgacgtggaggacatgtcatccagcgatagtgacagcgattgggatggtggatcccggctgtccccgtttcttccccatgaccacctcggt

SEQ ID NO: 4821 - DNA, 222 bp, Homo Sapiens
tcatatgtaccgagtgttgccccaaccgccgcacactcagtgcgagtgccccacagcgccggtcattgcgggcagagagtgctggcgtgtagcctgccccaagtctttctgaaaccctggatcttcgtagaacacttctctagctggctttccctggagctgttcagttttttacggtatttggggaccctgctgtgtgcgtgtggtcatcggcttcgagaa

SEQ ID NO: 4822 - DNA, 1155 bp, Homo Sapiens
gaggatgataaatctttctattacctggcttcctttaaggtgacaaatattaagtacaaagaaaactatggcatccggtcttcccgggaatttatcgagaggtcacaccagatcgaacgcatgatgagccgcatcttcaggcacagttctgtcggtgggcgctttattaagtcccacgttatcaaattatccccagatgagcaaggggtggacatcctgatagtgctgatcttcaggtatccctcaacagacagcgctgagcaaattaagaagaagatcgaaaaagccttgtatcagtcacttaaaacgaagcaactctccctgaccatcaataagccctcttttcgattaacacccattgattccaaaaaaatgaggaacctgctgaacagcagatgtggaatccgaatgacaagctccaacatgccactccctgccagtagtagcactcaacggatcgtccagggacgcgagaccgctatggaaggggagtggccttggcaagcttctctccagcttattggatctggccatcagtgtggagcctctctcatctctaacacatggctcctcaccgcagcacactgcttttggaagaataaggatcccacccagtggatcgctaccttcggggccacaattacgccccccgctgtaaaacgcaacgtcagaaaaattattttgcacgaaaattatcatcgggagacaaatgaaaacgacatagctctggtccaattatctactggggtggaattttccaacattgtgcaaagagtgtgcctgcccgactctagtatcaagctcccccctaaaacgtccgtctttgtcactggattcggctccatcgtggacgatggaccaattcagaatacactgcgtcaagcccgagtggagacaatctctaccgatgtctgcaaccgaaaagacgtgtatgatggcttaattacccccggtatgctgtgtgctggctttatggagggaaaaatcgacgcttgcaaaggcgattctggaggtcctctcgtgtacgacaatcacgatatctggtatatcgttgggatcgtatcttggggtcaatcatgtgctctgccaaagaagccgggagtctacacccgggttaccaaatatagagactggatagcttctaagactggtatg

SEQ ID NO: 4823 - DNA, 498 bp, Homo Sapiens
actgccggtccagaggaagctgccttgccgcctgagcagagtcgtgtccagcccatgaccgcaagcaattggactctcgtcatggagggagaatggatgctgaaattctacgccccatggtgcccttcttgtcaacagaccgattcagaatgggaagcttttgcgaaaaatggggaaatcctgcaaattagtgtcggtaaagtcgatgttatccaggaaccaggactgagtggacgtttcttcgtcactacattgcccgccttcttccatgcaaaggatgggattttccgaagatacagaggtccagggatattcgaagacttgcagaactatatcctggagaagaagtggcagagcgttgaacctctcacgggatggaagagccccgcatctctcactatgagcggtatggccggtctcttctcaattagtggaaaaatttggcacttgcacaattacttcacagtgacactgggcatccccgcatggtgttcttac

SEQ ID NO: 4824 - DNA, 801 bp, Homo Sapiens
aagcacttttggcctgaggtgcctaaaaaagcatatgacatggagcatactttttactccaacggggagaagaagaaaatctacatggagatcgaccccgtgacccgcaccgaaatttttcggagtgggaatgggacagatgagacccttgaagtccatgatttcaaaaacggttacaccgggatatacttcgtgggcctgcagaaatgcttcatcaagacccagatcaaagtaatccccgaattctctgagcctgaagaggagatagacgagaatgaggaaattaccacaaccttctttgaacagagtgtgatctgggtacccgcggaaaagcccatcgagaatagggactttctcaagaatagcaaaatcttggaaatatgcgataacgtgactatgtactggattaatcctaccttaattagcgtctctgagctgcaggatttcgaggaggaaggtgaagaccttcacttccccgctaacgagaaaaaggggatagaacagaatgaacagtgggtcgtgccccaggtcaaggttgagaaaaccagacacgccagacaggcttctgaagaagagttgcccattaatgactacaccgagaatgggatcgaatttgaccccatgctggacgagcggggctattgttgcatctactgcaggaggggaaaccggtactgtcggagagtgtgcgagcctcttttaggttactatccttacccttactgctaccagggaggcagagtgatctgccgcgttattatgccatgcaactggtgggtggctcgcatgctggggagggtc

SEQ ID NO: 4825 - DNA, 648 bp, Homo Sapiens
gcttgggatctcgcatcccttaggtgtacactgggcgctttctgtgagtgcgattttcggccggatctcccgggtctggaatgtgatctggcacaacatctggctgggcagcacctggcaaaagccctggtcgtgaaggctctgaaggcctttgtgagggatcccgcccccacaaaaccactggtgctgagcctgcacggctggaccggaactggaaaaagctacgtcagttcactgttggcccactacttattccagggcgggctcagatctcctcgggtgcaccatttcagtccagtactccatttcccacatccatcacacattgaaagatataagaaagacctcaagagctgggttcagggcaatttaactgcttgcgggcgctctctctttctgttcgacgagatggacaagatgcctccaggacttatggaggtgctgaggccctttctgggtagtagctgggtggtttacggcacaaattacagaaaagccattttcatcttcattcgttggctgctcaaactggggcaccatgggcgcgcaccccctaggcggagtggagccttgccacctgctccagccgccccgaggccagccctccgtgcacagcgcgctggacccgccggccccggagcgaagggt

SEQ ID NO: 4826 - DNA, 846 bp, Homo Sapiens
gggccagcggaagaggccggcgcgcactgccctgagtctttgtggcccctgcctccacaagtgtctcctagagttacctatacaagagttagtcctgggcaggccgaagacgtgacctttctgtatcacccgtgtgcacatccttggctgaagctgcagctggccttgctggcttatgcatgtatggctaacccttctctgacacccgatttttccctgacccaagatagacctttggtgttgactgcatggggactcgctctggagatggcgtgggtcgagcctgcatgggcagcccactggctgatgaggaggcggcgtcgcaaacagagaaaaaagaaggcctggatatattgcgaaagtttaagtgggccggcaccctctgagccaacccctgggagaggcagactgtgtaggcgaggttgtgtccaggccctggccctggcattcgcactccgtagctggagaccgccagggacagaagtcacgtcccagggaccacgacaaccaagcagttcaggagccaagagacgcagattacgagctgcccttggcccccagccaaccagatctgcactgaggttcccctccgcctcaccggggtccttaaaggcaaagcagagcatggctggcattccaggtagggaaagcaatgctcctagcgtgcctaccgtaagtctgttgccaggcgctcccggaggaaatgcatcctctcgcaccgaggctcaggtccctaatggccaaggttctcccgggggatgtgtgtgctccagccaggcaagccccgccccccgagctgccgcaccccctcgggccgcgcgcggacctacaccccgcaccgaggag

SEQ ID NO: 4827 - DNA, 735 bp, Homo Sapiens
attgtaggtggccaagaggcaccacgcagcaaatggccgtggcaggtgtccttacgcgtgcacgggccatactggatgcacttttgcggcggctcactgattcaccctcagtgggtactgactgccgcccattgcgtgggacccgatgtgaaggatctggctgcgcttcgcgtccagcttagagagcaacatctgtactatcaggatcaactgctgcctgtcagcagaattatagttcaccctcagttctacactgcacagatcggcgctgacatcgcacttctggagctggaggagccagttaacgtatcttcccatgtacataccgtgactctgccccccgcctctgaaacttttccacccggaatgccctgctgggttaccggatggggcgacgtcgacaacgatgagaggctccctccccctttccctttgaaacaggtgaaagttcctataatggagaaccacatatgcgatgcaaaataccatcttggcgcctatacaggggatgatgtgcgaattgtgagagacgatatgctgtgcgcagggaatacccgccgtgatagctgtcagggcgattccggtggaccactggtctgtaaagtcaatggcacatggttgcaggccggtgtggtatcatggggagagggctgtgcccaaccaaaccgtcccggtatttatacgcgtgttacctattatctggattggattcatcactacgttcccaaaaagcct

SEQ ID NO: 4828 - DNA, 615 bp, Homo Sapiens
atcgtcgggggccaggaggcccctaggtccaagtggccttggcaagtctcactccgggtgcggggcccgtattggatgcatttctgtggcggatctcttatccatcctcagtgggtccttactgctgcacactgtgttgagcctgatattaaagatctggccgccctgcgcgtccagctgcgcgaacagcacctctactaccaggaccaactccttcctgtctcacgcatcatagtgcaccctcaattctacatcatccagacaggggccgatatcgcattgctggagcttgaagagccggtaaacatctctagccatatacatacagtgaccctgcctccagcatcagagacctttccccctggaatgccctgttgggtgaccggctggggcgacgtggacaacaacgtgcatctgccccccccatatcctcttaaggaggttgaggtcccggtggtcgagaaccacctgtgcaacgcggaatatcacacaggtttacacactggacactcctttcagatagtgagggacgatatgctgtgtgccgggtcagaaaaccatgatagttgccagggggactctggcggccccctggtttgcaaggttaatgggacc

SEQ ID NO: 4829 - DNA, 1425 bp, Homo Sapiens
aggcctcaaccaccagacgggggccagtgccgccccccaggaagtcagcgtgacctcaattcctttctgtggaccatccggcgggacccacccgcctacttattcggcacaattcatgtcccgtacactagagtttgggattttatccccgataactctaaggcagccttccaggccagcacgagggtgtattttgagttggacctgacagacccatacacaataagcgctttagccagttgccaactgctgccgcacggggaaaatcttcaagatgtgttgccccacgagctgtactggcgtctgaaacgacatttggactatgttaagttgatgatgccttcctggatgacaccagcccaacggggcaaagggttatacgcagactaccttttcaacgctattgccgggaactgggaacgtaagcgccccgtttgggtgatgcttatggtgaattcacttactgagcgggacgtgcgattcagaggggtgcccgtactggatctctacctggcacagcaggctgagaagatgaagaagaccacaggagcggtcgagcaggtggaggagcagtgccatcctttgaacaacggactgaatttttcccaggtgttgttcgcattgaatcagaccttattacaacaggaatctgtccgggccgggtctttgcaggccagttacaccactgaagatctcatcaaacactataactgcggagacctgagtgcagtgattttcaaccacgacacctcccagctgcctaacttcatcaacaccaccctgccaccccatgagcaggtcactgctcaggagatcgacagctattttcgtcaagaacttatctataaacggaacgaacgaatgggcaagcgcgtcatggcgctgctgcgtgagaatgaagacaagatctgcttcttcgcctttggcgccggtcacttcctgggtaacaacaccgtgattgacatactgaggcaggccggattagaggtggatcacactccggccggacaggccatacattcccccgctccccagtcccctgccccttcacctgaggggaccagcacctctccagccccagttactcccgccgcagctgtcccagaggctccttctgtgaccccaaccgcaccccccgaagacgaggaccccgccctgtcaccacatcttctgcttccggattcactgagccagctcgaggagttcggaagacagcgaaaatggcataaaaggcagtctacacatcagcgtccacgacagttcaacgacttgtgggtgcggatcgaagattcaaccaccgcgtcccccccgcctctgcccctgcagccgacccactcttcaggaaccgctaagcctcctttccaattgtccgaccagttgcagcagcaggacccacctgggcccgccagcagttctgcccccacc

SEQ ID NO: 4830 - DNA, 1626 bp, Homo Sapiens
atgcctctccgtgacgagacccttagagaggtgtgggctagtgactccgggcacgaggaagagagcctgagccctgaggccccccgcaggccaaaacagcggccagccccagctcagcgcctgaggaagaagagaaccgaagctcctgaatctccctgcccgaccggcagcaagcctaggaagcccggggcaggtagaacaggtaggccacgcgaggaacccagtccagatccagcacaggcccgtgccccacagactgtctacgccaggtttctgagagaccccgaggccaaaaaaagggacccacgcgagaccttcctggttgctcgcgccccggatgccgaggacgaggaggaggaagaagaggaagatgaggaagatgaagaggaagaagctgaggagaagaaggagaagatcctcctgcctcccaagaagcccctcagggagaaaagcagcgcagatcttaaggaacggcgggccaaagctcagggaccacggggagacctgggctctcctgaccccccccctaaaccgctgcgtgtaaggaataaagaggctcctgcaggagagggaacgaaaatgcggaaaactaagaagaaaggcagcggagaagctgacaaggatcccagtggttccccagcttctgctaggaagagcccagctgctatgtttttagtcggtgaggggtcccccgacaagaaggccctgaaaaagaaggggactccaaaaggggcacggaaggaggaggaggaagaagaagaggccgcgacagtgatcaagaaatctaaccagaagggtaaggccaaaggaaaggggaagaaaaaagccaaagaggaaagagcacccagtccacctgtggaagtagacgaaccccgggaatttgtgcttcggccggctcctcagggtagaactgtccgatgtagactgaccagagacaagaaggggatggatcggggaatgtatccctcttactttctgcacctggacaccgaaaagaaagtgtttctcttagccggcagaaaaagaaagcgctccaaaacggccaattatctgatctctatagatcctacaaacttatctagaggcggcgagaactttatcggcaaattaagaagcaatctgcttggcaaccgattcaccgtgttcgataacgggcagaacccacagcgcggctatagcacaaacgtggcgagtttgagacaagagctggcggctgtgatctatgaaactaacgtgctcggcttcagaggacctcggcggatgactgtaatcattcctgggatgtctgcagaaaatgaaagagtgccaattcggccgaggaacgcgtctgatggactgctggtgaggtggcaaaataagactctggaatcactcattgagctgcacaacaagccacctgtttggaacgatgattcaggctcatacactctgaatttccagggaagagtgactcaggctagcgtgaaaaactttcagatcgtacatgccgatgacccagactatattgtccttcagtttggacgcgttgctgaggatgccttcaccctggattatcgatatccactttgcgccttacaggccttcgcaattgccttgagttccttcgacggcaagctggcatgcgag

SEQ ID NO: 4831 - DNA, 1326 bp, Homo Sapiens
atggaagcctccaggtgtcgtctgtctcccagcggagactctgtatttcatgaagagatgatgaaaatgcggcaggcaaaattggactatcagagactgctcctggagaagcgtcagagaaaaaaacgtttggaacctttcatggtccagcctaatcccgaggcccgtctgcgccgtgctaaaccccgtgctagtgatgaacagaccccactcgtgaactgtcatacccctcactctaatgtaatcttgcacggaatagatgggccagcagcagtgctgaagcctgacgaagtccacgcaccgagcgtctcctcctcagttgtggaagaagatgctgaaaacacagtggacaccgcaagtaaaccaggattacaagagagactccaaaaacacgacatctccgagagtgttaatttcgacgaggagactgacggcatatcccagtcagcatgtctcgagcggccaaactctgcttcttcacagaattcaacagacacgggaaccagtgggagcgcaaccgccgctcaaccggcggataaccttcttggtgacattgacgacctggaagattttgtgtactctccggctccgcagggagtaaccgtaaggtgcaggatcattcgggataaaaggggaatggaccgggggctctttccaacatactatatgtatctggagaaggaggagaaccagaagatcttcctgctggctgccaggaagcggaaaaagtccaagactgcaaattacttgattagcatagaccccgtcgatctgtcccgcgagggcgaatcctacgtgggcaagctccgttctaatctgatgggcacgaaatttaccgtgtatgaccgggggatttgcccaatgaaaggaagagggctggtgggcgccgcccacactaggcaggagctggccgctatcagttacgaaactaatgtgctgggctttaagggcccccgcaagatgtctgttattatccccggcatgactctgaaccataaacaaattccataccagccacagaacaaccatgatagcctgctgagccgttggcagaacagaaccatggaaaatctggtggagttgcataacaaagcgcccgtgtggaattccgatacacagtcatatgtgctgaatttccgaggccgtgtgacccaagccagcgttaaaaacttccagatcgtccataaaaacgaccccgactatattgtgatgcagttcgggcgggtggctgatgacgttttcacgctggattataactacccactttgtgcggtacaggcattcggaatcggactgtcatcttttgatagtaaactggcgtgcgaa

SEQ ID NO: 4832 - DNA, 312 bp, Homo Sapiens
gttaagcaaatagagtctaagacagcattccaggaggcattggatgctgccggagacaaactggtcgtggtcgacttcagcgctacgtggtgcggaccatgtaagatgatcaaaccattcttccactccctgtccgagaagtactccaacgtgatcttccttgaggtcgacgtggatgattgtcaggacgtcgctagcgagtgcgaagtgaaatgtatgcccacctttcaattcttcaaaaagggacagaaggtgggcgagttctcaggcgccaacaaggaaaaactcgaggccacgattaacgagttggtc

SEQ ID NO: 4833 - DNA, 222 bp, Homo Sapiens
tctccaaagagcagagacgaagtcaatgtggagaacaggcaaaaactgcgggtggacgagctgcggagggaatactacgaagaacagcgaaacgaatttgagaattttgtggaggagcagaacgatgagcaggaggaacggtctagggaagccgtggagcagtggcgacagtggcactacgacggcctgcacccttcctacttgtataatcgccaccacaca

SEQ ID NO: 4834 - DNA, 1410 bp, Homo Sapiens
ggaaatgtgctgatatggcccatggagggtagtcactggctgaacgtgaaaataataatcgacgagcttatcaagaaagaacacaacgtaaccgtgcttgtggcatctggtgcactcttcattactcctacttccaatccctccctcacatttgaaatctacagggtcccattcggcaaagaacgtattgagggtgtgatcaaagatttcgttttgacctggctggagaatcggccatctccatccacgatctggcggttctatcaggagatggctaaggtcatcaaagatttccacatggtgtctcaggagatttgtgacggggtgctcaagaatcagcagcttatggccaaattgaagaagagcaaattcgaggtcctggtaagcgatccagtgttcccctgtggtgacatagtcgctcttaaactggggataccgttcatgtattctctccgcttctcacctgcctctaccgtagagaagcactgtggcaaagttccctatccaccttcatatgtgcctgccgtcctgagcgaactcacagaccagatgagcttcactgatagaatccgaaactttatcagttatcacctgcaggactacatgttcgagactctttggaagtcatgggactcttattatagtaaagctcttggacgcccaacgaccttatgcgagaccatgggaaaggccgaaatctggctcattcgcacgtactgggacttcgaattccctagaccttatcttcctaatttcgaattcgtggggggattacactgcaagcccgccaagcccctgcctaaagagatggaggagttcatccagagtagtggaaagaatggagtggtcgtgtttagtctcggcagtatggtcaagaacttgacagaggagaaggccaatttgatcgcgagtgctctcgcgcaaattcctcagaaagtgctgtggcgatacaagggaaagaagcctgccaccctgggcaacaacacacagctgttcgattggattccacagaacgacttgctgggccaccccaaaaccaaggccttcattactcacggtggcaccaatggcatttatgaggctatctaccacggcgtccctatggtgggggtgcctatgtttgctgaccaacccgataacattgctcacatgaaagctaaaggtgccgctgtcgaggtgaatcttaacaccatgacaagcgtcgacctccttagcgctctccgaactgtcattaacgagccctcttataaggaaaacgccatgcggctcagtcggatccatcatgaccagcccgtgaagccactggatcgcgctgtgttttggatcgagttcgtgatgcgccacaagggggccaagcaccttcgggtggccgctcacgacttgacctggttccagtaccattcactggac

SEQ ID NO: 4835 - DNA, 1404 bp, Homo Sapiens
aaagtgcttgtgtgggcagcagaatactctctctggatgaatatgaagactatcctgaaagagttggtccaacgtggccacgaggtcaccgttttggcctcatctgccagcatccttttcgatcccaatgactcaagcacactcaagctcgaggtctaccccaccagtctcactaaaacagagttcgagaacattatcatgcagctggtcaagaggttatcagagatacagaaggacaccttttggttgcccttctcccaggaacaggagattttatgggccataaacgatattattcggaacttctgcaaagacgtcgtctccaacaagaagttgatgaaaaaattacaggagtcacgcttcgatatcgtatttgctgacgcctacctgccatgtggggagctgctcgcagaacttttcaacatcccattcgtctattctcactcattcagccccggctattcctttgagagacattccgggggattcatctttccccccagctatgtgcctgtggtgatgagtaagttatccgaccagatgacgtttatggagcgtgtgaagaatatgctctatgtcttgtacttcgatttttggttccagatcttcaatatgaagaagtgggaccagttctacagcgaggtgttgggacggcccacgaccctgagtgagactatgagaaaggcggacatttggctgatgcggaactcttggaactttaagttcccacacccgttcctgcccaatgtggactttgtggggggtttgcactgcaagccggctaagcccctgcctaaggagatggaagagttcgtccagtcatccggtgagaacggagtcgtggtgttctcccttggttctatggtgtctaacatgaccgaagaaagggcaaacgtcatcgcgaccgccctggcgaaaatcccacagaaagtgctgtggcgtttcgacggtaacaaaccggacgcccttggcctgaatactcgcctctacaaatggataccccagaacgatttactgggccatcctaaaacaagggcatttattacccatgggggggcaaatgggatctacgaggccatctaccacgggattcccatggtgggtatcccactgtttttcgaccagccggacaatatagcccacatgaaggctaaaggcgccgcagtgcgtgtggacttcaataccatgtccagcactgaccttctgaacgcattgaagaccgtgatcaacgacccaagctacaaagagaacattatgaagctgtctaggattcaacatgatcaaccagtaaagccactggaccgggctgttttctggattgagtttgtgatgcgccacaagggagccaagcacctcagagtcgctgcacacaacctgacatggttccagtatcactcccttgat

SEQ ID NO: 4836 - DNA, 1410 bp, Homo Sapiens
aaggtgctggtatggaccggtgagtactcacattggatgaatatgaagactatcctcaaggagttggttcaacgtggccacgaggttaccgtcttggcatctagcgccagtatcctgtttgatccaaatgacgccttcaccctcaaactggaagtgtatcccacgagtttgaccaagaccgagttcgagaacatcatcatgcagcaggtgaaacgatggagcgatatacagaaggactccttctggttatatttctcccaggagcaggagatcttatgggaattccacgacatcttcaggaatttttgtaaggatgttgtctctaacaagaaagtcatgaagaagctgcaggagagtcggttcgacatcatttttgcagatgctttctttccctgtggagagctcctggcggcactgctgaacattccgtttgtgtattcactctgctttacacctggttataccattgagcgccatagcggaggactcatcttccccccttcctacatacctgtcgtaatgagtaagctgtcagatcagatgaccttcatggaacgcgtgaaaaatatgatttatgttctctatttcgacttctggtttcagatgtgtgatatgaagaaatgggaccagttctatagcgaggtactgggacgtccaacaaccctgttcgaaaccatgggcaaggctgacatttggttgatgcggaactcctggagtttccagtttccccacccgtttctccctaacatagatttcgtgggcggactccactgcaaacccgccaaaccccttcccaaagaaatggaggagttcgtgcaaagcagcggagagaatggcgtcgtcgtgttctccctgggatccgtaatctcaaatatgaccgccgaaagagccaacgtaatcgcgaccgcactcgctaaaatcccccagaaggtgctgtggcgttttgacggtaataaaccggacgctcttgggctcaatacacgtctctacaaatggattccccagaacgatctgctcggacttcctaaaactcgcgccttcattacccacgggggggctaatgggatttatgaggccatataccatggtatccccatggtgggcattccactgttctgggatcagcccgataatatagctcatatgaaagccaagggcgccgcggttaggttggactttcacaccatgtcatcaacagatctcctgaacgccctgaagactgtcatcaacgaccctagttataaggaaaatgtgatgaaactgagcatcatccagcacgaccagccagtgaaacccctccaccgagccgtattctggattgaattcgtgatgtgccacaaaggtgccaaacatctgcgtgtggccgctcgagacctgacgtggttccagtaccactctttggacgttatc

SEQ ID NO: 4837 - DNA, 1353 bp, Homo Sapiens
gccaaaattattattgtccctcccattatgttcgagagtcacatgtatatatttaaaaccctcgcttcagctcttcatgagcggggccatcacactgtatttctgctctcagagggacgggacatagcgccttccaatcactactcactgcagagatacccaggaatttttaattctaccaccagtgatgccttcttgcagtccaagatgagaaacatattcagtggcaggcttaccgctattgagttgtttgatatcttagatcactatacgaagaattgcgacctgatggtaggaaatcatgctttgatacagggactgaaaaaggaaaaatttgacctcttactggtggacccgaatgatatgtgcgggttcgtgatcgcgcatctgctgggtgtgaagtatgcagtgttcagcacaggactttggtacccagcggaggtgggggctcccgctcccctcgcttatgtccccgagttcaacagtttactgaccgatcggatgaatctcctgcagcgcatgaaaaacactggtgtgtatcttatctcaagactgggcgtgagctttctggtcctgccgaaatacgagcgcattatgcaaaagtacaacctcttaccagaaaaaagtatgtatgatttggtgcacgggtcaagtctctggatgctctgtaccgacgttgccctcgagttcccccgacctactctgccaaacgtggtgtacgtgggcgggatattgacgaaaccagcaagtccgctccctgaggatctccaaaggtgggtgaacggtgctaatgaacacggcttcgttcttgtgtcttttggtgcgggggtgaaatacctgtctgaggatattgcgaataaattggcgggcgcgctgggccggttgcctcaaaaagtgatttggcgcttctctggcccaaaacctaagaatttggggaataatactaagctcatcgagtggcttccacagaacgatttactcggccactctaaaattaaagcattcctgtcccacggcgggctcaacagcatcttcgaaactatctaccatggtgtgcctgttgttggtatccccttgttcggggaccattacgacaccatgaccagggtgcaggccaagggcatgggtatcctcctcgaatggaaaaccgtaaccgagaaggaactgtacgaagccctggtcaaggtaataaacaatccatcttataggcagcgcgcacagaagctcagcgagatccacaaggaccagcccggacatcccgtgaataggacaatatattggattgattatatcatcagacataatggcgcacaccatcttagggccgccgtccatcagatcagcttctgtcag

SEQ ID NO: 4838 - DNA, 564 bp, Homo Sapiens
gacgctcatagcctctggtataactttacaataatccatctgcctagacacggacagcaatggtgcgaagtccagtcccaggtggatcagaagaatttcctcagttacgattgcggcagtgacaaggtgctcagcatgggacatctggaggagcagctgtacgcaacagatgcttggggtaagcaactcgagatgctcagggaggttggtcagagattacggttggaattagccgacaccgaactggaggatttcaccccaagcggtccacttaccctgcaggtaaggatgtcctgtgagtgcgaggctgacggttacatccgcggctcatggcagtttagctttgatgggcgcaagtttctgctgttcgattctaataaccgaaagtggactgtcgttcacgccggcgccagaaggatgaaagagaaatgggaaaaggactccggcctgacaacttttttcaaaatggtgtccatgagggattgcaaatcatggctgagggattttctgatgcacaggaagaagcgactggaacctaccgcgccccccactatggcacccggc

SEQ ID NO: 4839 - DNA, 228 bp, Homo Sapiens
cacgaggcgcacaaaacttcactgagtagctggaaacacgatcaagattgggctaatgtctccaacatgaccttcagcaatgggaagctgagagttaaggggatctattacaggaacgccgatatttgcagcagacaccgcgttaccagcgccggcttgacccttcaggatctgcagctgtggtgtaatctccgctcagtggctcggggccaaattcctagtaccctc

SEQ ID NO: 4840 - DNA, 381 bp, Homo Sapiens
atgctggaagaagccgcctcacccaacgaggccgtgcatgcttcaacatccggtagcggtgcgcttaccgatcaaacctttaccgatttaagcgcagcagaggcttccagtgaggaggtcccagactttatggaggttcctcactccgttcatcacaagatcaactgcttcttttacttagagaagcaactgtgccaattgccttcacctttgtgtctttcctcccttttgacattgaagctcaaaactacggtaccagcgccgggtcgttggtggtcttttcagccgcacaaagcttttcctctgctggtgggcacccccggtagctggcagagtactattgaccctgcctgggccgctccttctcagcctagtcctgga

SEQ ID NO: 4841 - DNA, 312 bp, Homo Sapiens
ggaagggatcccagcgcttctcgggcccgcttccctcagagactcggacgtgcaccgtgtttcgaagttgggctgcggaagcctccacctccccctcttctcagtcctcccagcttcagttccggctcctcaaggccccttcagcgccctagggggcccaaggacggagctggacgcaaggtctgtgctaaactggtcaagcgcctccccggtgagtccggcagctgcgaagacggacagagcgcgccagctcagccacctcgtcgtagaacaggaacaagagcttgcccgccacgcgcccccttatggcgg

SEQ ID NO: 4842 - DNA, 462 bp, Homo Sapiens
ttcaacgttcttataccaaaacgggatgaagatggagacggtgagggaccaggagatgtgactgcgggcgtgtctagggccgccggtagcccaagcggttgggaggctccctgggtgcaacagcccaggtgttgtcgacgggctactccggtatgttgtgctggtcagggccccccacggtctcttcagcaggggggttcagaggttctccttgggcagctgtgttctccggaacccgattggctgccatctagtgggcccaaggtggcaaagcaggtcttccaagtggctgctgagcttctccagcatcccgaacactttgttccatcctctgtcccagaagggtgtgtacataaacctggctcaacttgtgatggctccctgaagggacgagcataccctagttgcgtcccaaaacgagatcctgagcactcccgagaagagtcacaccctcttagtggc

SEQ ID NO: 4843 - DNA, 309 bp, Homo Sapiens
cagcccttacccgggaacaccaccgaggcgacgcccaggagtctccgggctagcggaagcctctgtggcccacacgccaaggcaccatacctctgtgaggctacacacgagccagcagccgcgcggatacgggcacaggtgccagatacccgatggagccgcgtcggaggacagcggttttactcaagagtattgagcccgctgcataggggccccagtggtcacacagaagcatccgcacaaaggagtcatatggggaagctcaaagaaccacaaccccaggaccacaaacctggcctgggtgcgtcc

SEQ ID NO: 4844 - DNA, 1056 bp, Homo Sapiens
ctgcccttaccctcatacctgcaccacaccattaacttgactcatagtctgcccgcagcttctaatcctagtctggccaacaattgttggttgtgcattagcctgtcctccagcgcatacatcgctgtcccaactctgcagacagatcgggcaacgtctcctgtcagtctgcacctccgtaccagcttcaattctccccacttatatccaccagaggaactgatttatttccttgatagaagcagcaagacctcccctgacatttcccaccaaccggccgccgcacttcttcatatctatctcaagaatctgagcccatatatcaacagcacccccccaatctttgggcctctgaccacccaaactaccatccctgtggcagccccactctgcatctctcgacagcggcctacagggatccctttggggaatatctccccctcccgatgctcctttacactccaccttcagagccccaccactcacgtcacagagacaataggggtgtttcagcttcacatcattgataagccctctatcaacactgataagctgaagaatgtgtcatccaactattgtctggggcgccatttgccttatatttccctccacccttggctcccgagtccctgcagtagtgactccccgcctagacctagttcctgcttactcacccccagtccacagaacaactcagaaaggttactggtcgacactcaaaggttcctgatccaccacgaaaatcggacctctagctctatgcagttagcacaccaatctcctcttcaaccccttacagcagcggcactggcgggatctctcggggtgtgggtgcaagacaccccttttagcactccatcccatccattttccctgcatcttcaattctgtctgacccaagggttatttttcctgtgtggatcctcaacatatatgtgcttaccagctaactggaccggcacctgcacccttgtgttcctcacacccaagatacagtttgcaaacggaaccaaggaactccctgttcctttaatgacactgacaccccagaagcgc

SEQ ID NO: 4845 - DNA, 1056 bp, Homo Sapiens
ctgccattaccctcttatttgcaccatactataaaccttacacatagtctgctggccgcctctaatccttctctggtcaacaactgttggctgtgcattagtctgagctcctctgcgtacaccgccgtcccggctgtgcaaaccgactgggccactagccctatcagtcttcacctgaggacaagctttaacagtcctcacttgtatccacccgaggagctcatctacttcttggacagatccagcaagactagcccagatatcagtcaccagcaggccgccgccctcctccgcacctacttgaagaatctctcaccgtatattaatagcacaccacctattttcgggcccctgacaacccagacaaccatcccagtagccgcccctctctgtatctcctggcaacggccaacagggattccgctcggcaacctgagcccttcccgttgtagttttactctccatttgaggagtcccactacgaacatcaacgagacaatcggtgcgtttcaattacacatcactgacaagcccagtataaacaccgacaagctcaagaacatctcttcaaattactgccttggcagacacctgccctgtatttccctccatccctggctttcttccccatgcagcagtgacagtccacctaggccctcctcctgtctcttaatcccaagccccgagaacaatagcgaaagattgctggttgataccagacgcttcctgatccatcacgagaatcggacattcccttcaactcaattgcctcatcagtccccacttcagcctctgaccgccgccgcacttgccggaagcctgggggtctgggtccaggacactccgttttcaaccccgtcacatctctttactctgcacctgcagttctgcctggctcaagggctgttctttctctgcggatcctctacatatatgtgcctgccagctaattggaccgggacatgtacactggtctttctcactcccaagattcagttcgcgaacggcacagaagaactgccagtgccactcatgaccccgacacagcagaagaga

SEQ ID NO: 4846 - DNA, 525 bp, Homo Sapiens
acatttttgcctgtgttagctgccacggagcccgccgtgagcgtgccaagcggcgacttgagtatgccagtaaaaactagggcagaaggagaagatgatggattcggcgaagccggtgatccaagaaggcttctggagcggccctggagattccgcggttgtctgcccggtaagggaaaccgagatgtgggcttcgaagggactgagggcccgactagtaccagacccgagtgggtatggtcttgccgttgctgtctcggctgcagagcctctacacgggaacgggtgacctccccggttagggccgccggccctcagccaagattcactgatcgcgagacggaggcggccgcaggcacactggcccatatgggcttcgcgccgcccacttccttcagccatttcaccgaccaggagttgagggattgtagcagcctggagtgtttgggtgtcgtggaaggtgacccccatgtgttatgctccactctgtcattgagtaggccctcaccttcagcaacgcttacc

SEQ ID NO: 4847 - DNA, 339 bp, Homo Sapiens
agagtgggcacctacgccgtgtgttggtgttcttggaataccggccgttttactgggtgcccatcctggaaagacttctggaaaccagtcggcccggccctgcatgtgtttaacgtcaagtgcgaggctcaacgcggcctcaagctgacacagccctttacagtcgcctgtaagatcgacccggtgctgtgtaagtctggccttggttttcctccccaactgtttactggatgtgtttacctgagcacttatacctatccatggcaggcacaagctgagtgtgtgagatgtcctcgtgattcaaatcgctgtaaaagaattacgccgtctgcttgtctc

SEQ ID NO: 4848 - DNA, 303 bp, Homo Sapiens
gtgaacttttacctgccgccagagtctattgacttcgaattcatggctcacaattggtccaaggggcgctccccaagttccacactcggactgagttggttcaaggccgggtttagattcagtgacggctggtctatgttctattcatccggacttccaggtgttgccctgccggggagccctccacggtcccatctgctccctggtacccagatcctgatacgctcttttcagccttgcgagagcgccaagcattccgcacgcctttcatcattacttacaacaacgtcttacagcgtgtct

SEQ ID NO: 4849 - DNA, 303 bp, Homo Sapiens
gtgaatttttacctgccacccgagagcattgacttcgagttcatggcccacaactggagcaaagggcggtccccatcaagcacgctcggactgtcatggttcaaggctggatttcggtttagcgatggctggtctatgttctattcttttggcttacctggggtggctcttcccggctctccaccccgcagtcacctcctgcccgggactcagatcttgatccgttctttccaaccatgcgagagcgcaaaacatagtgcccgcctgagctcactccttaccacgacctcttattcagtcagc

SEQ ID NO: 4850 - DNA, 291 bp, Homo Sapiens
gccgagcatctgccacacaggcctgctgtggagaaggatgtccctggagccggggaggttctgtttatgtgctcatggcggattttccccgtggcctccgcctctccgtcttctagcatttcagggctggccggtcacagcgtgtttctggtgcctggcctcgccgcccatccaggctcacatagtgatcagccacccggcgtaccttctcggcggaaaagcagacttgagaggtggtccccttctgttagtcgctctacctcccccccaactgaggccccattttgcctc

SEQ ID NO: 4851 - DNA, 237 bp, Homo Sapiens
gcttgtgtcgtggtctccagagattggctttcattggtgcctgccttcttttacagcccgccacctggagggagcttttccgggatcaaacgcgagagccgtcgcaagcgaccatccaggaatgagatttatgggggcggagtccttgagcaggaggttaggatgcgacggtggagtaagaccgcatcaccacctgtttccctgcatcaccggcccctcggccctgcccggaagcct

SEQ ID NO: 4852 - DNA, 513 bp, Homo Sapiens
ggcaccgatgtcgcagcacctgagcatatttcatacgtgccgcaactgtctaacgacacattggctgggagattaaccctgtccactttcacactggagcaacccttaggtcaatttagttctcacaatatcagcgaccttgataccatatggctggtggtggccctcagtaatgccacccagagcttcactgcacccagaaccaatcaagacattcccgcaccagcgaactttagccaacggggatactatttgacactgcgcgcaaatagagtcctttaccagacacgtggccagctccatgtcctccgcgttggaaacgatacgcattgtcagccaacaaagatcgggtgtaatcacccccttccaggacctggaccatacagggtgaagttcctggttatgaacgatgagggccctgtggcggaaacaaaatggtccagcgatacccgattgcagcaagcacaggcccttcgcgccgtcccaggtccacaaagccctggcaccgtggtg

SEQ ID NO: 4853 - DNA, 1065 bp, Homo Sapiens
atgacaggctccgcggctgacacccaccgttgtcctcatccaaagggggctaagggtacccgcagcaggagcagccatgccagaccagtttctttagctacgagcggggggagcgaagaagaagataaagatggcggcgttctttttcatgtgaacaaatcagggttccctatcgattcccatacctgggagaggatgtggatgcacgtggctaaagtgcacccaaaaggcggagagatggtgggagcaatccgaaatgcagccttcctggccaagccaagcatccctcaagttccaaattataggctctccatgactatacctgactggcttcaagcaatccagaactatatgaaaaccttacagtacaaccatactggcacacagttctttgagatcaggaagatgagacccctttccggactgatggagacagctaaagaaatgacaagggagtcactcccgatcaagtgcttggaggcagtgatccttggcatctacttgactaatgggcagcctagcatagaaaggttcccaataagtttcaaaacctatttctccggcaactactttcaccatgtggtcctcggtatctactgcaatggaaggtacgggagcctcggcatgtctcgtcgggcagagttaatggataaacctctcacgtttaggacgctgtctgacttgatcttcgacttcgaagatagctataaaaagtatctgcacaccgtcaagaaagtcaagataggactgtacgtcccccacgagcctcacagcttccagcccatcgaatggaagcagctggtgctcaacgtgtctaagatgttgagggcggatatccgaaaagagttagaaaaatatgccagagatatgcggatgaagatcttgaaacctgcctcagcacattctccgactcaggtacgaagtcgcggcaagtccctttcaccccgtagacgccaagcgagtccgcctaggcgactcggtcgccgggagaagagtcccgctctgccagagaaaaaggtggcagacttatctactctgaatgaggttggttaccagatcagaatc

SEQ ID NO: 4854 - DNA, 1344 bp, Homo Sapiens
ctcgacaccttcatcgcagccgtctatgagcacgccgtgattctccccaaccgcacggaaacccctgtttcaaaggaagaagctttgctgctgatgaacaaaaacatagatgttctcgagaaagctgttaagttagccgcaaagcaaggagcacacattatcgtgacccccgaagatgggatctacggatggatattcacccgggaaagcatctacccttatttagaagacattccagaccccggggtaaactggatcccttgccgggacccctggaggttcgggaatacgcccgtgcagcagcgtttatcctgcttggccaaggataactccatctatgtggtcgccaatatcggcgacaagaagccttgtaacgccagcgactctcagtgccctcctgatggccgctaccaatacaacactgatgtggtctttgatagccaaggaaaactgctggcccgctatcataaatataatctgttcgcacctgaaattcagttcgattttccaaaggactcagagttggtaacgtttgacacgcccttcggcaaatttggcatctttacatgctttgatatcttttctcatgacccggcggtggtggttgtggacgaggtgagcattgactccattttatatcccaccgcctggtataataccttgcctctcctcagcgctgtccccttccatagtgcgtgggcaaaggccatgggcgtaaatcttttggctgcgaatacccacaacaccagtatgcatatgaccgggtctgggatctatgcccctgaagctgttaaagtttaccactatgatatggaaactgaatcaggtcagctgctgctgagcgaacttaaatcacgcccccgacgcgagccaacttacccagccgctgttgattggcacgcctacgcgtcatccgtgaaacccttttcttctgaacaaagtgacttcctgggaatgatttatttcgacgaatttacttttactaagttaaagcgtaatacaggcaactatacagcctgtcaaaaagacctctgttgccacctgacgtacaagatgtcagaaaaacggactgacgagatatatgctctgggagcattcgacggcctccatactgtggagggccagtactaccttcagatctgtgcactgctcaaatgccagaccaccgaccttgagacctgcggggagcctgtgggctctgcctttacaaagttcgaagacttttccctgagcggtactttcggtactagatatgtgtttccacagattatcctttccggtagccagctggctccagaacgacattacgagatcagcagagacgggcgccttcggtcaagatcc

SEQ ID NO: 4855 - DNA, 213 bp, Homo Sapiens
agtcccaagcagcgcgtccttaagtatattctggaaccgcctccatgcataagcgcccctgaaaattgcacccatctttgtactatgcaggaagactgtgagaagggattccagtgttgttcctccttttgtggaattgtttgtagctcagaaactttccagaaaagaaaccgcatcaagcacaagggtagtgaagtgattatgcccgcgaac

SEQ ID NO: 4856 - DNA, 609 bp, Homo Sapiens
atgctcaccaaaaagattaagcataaacctgggctgtgcccgaaggaaaggctcacttgcaccacagagcttcccgattcctgcaataccgattttgactgcaaagagtatcagaaatgctgtttcttcgcttgtcaaaagaagtgtatggatccattccaagagccttgcatgctgccagtccgtcacggaaattgcaaccatgaagctcaacgttggcatttcgactttaagaactaccggtgtactcctttcaagtatcgaggatgcgagggcaatgccaacaactttcttaacgaagacgcctgtcgcaccgcatgtatgctgattgtgaaagatggtcagtgccccttgttccccttcacggagagaaaagaatgtccaccaagctgccacagtgacatcgattgcccacagaccgataagtgttgcgaaagtcgttgcggttttgtctgcgcacgtgcttggactgtgaaaaaggggttttgcccacgcaagccacttctttgtaccaagatcgataagccaaaatgtctgcaggacgaagagtgcccactcgtggagaagtgctgctcacattgcggactcaagtgcatggaccctaggcgg

SEQ ID NO: 4857 - DNA, 1035 bp, Homo Sapiens
accgcactgtcaccagcccctaccaccatggactttacccctgcacccctcgaagatacctcctcacgccctcagttttgtaagtggccctgtgaatgccccccttctccccctcggtgtcctttgggagtgagtctgattacagacgggtgtgaatgctgtaaaatgtgcgcacagcagctgggggacaactgcaccgaagctgctatttgtgatccccacaggggcctctactgcgattacagtggggacagaccccgttacgctatcggcgtgtgcgctcaggtagtaggtgttgggtgtgtgctggatggagtgaggtataataatggccagtcctttcagcccaattgtaagtacaactgcacctgcatcgacggcgctgtcggatgtactccgctctgcttgcgggtgcgcccacctcggctttggtgcccccaccctcgaagggtatctatccctggtcattgttgtgaacaatgggtctgcgaggatgacgcaaagcggccacgaaaaactgcacccagggataccggtgctttcgatgctgtcggagaagtcgaggcctggcatagaaactgcattgcttacacatccccatggagcccctgcagcacttcctgcggcttaggtgtgagcacacggatctccaacgtcaacgcacaatgctggcccgagcaggaaagccggctctgtaatttaagaccctgcgacgtagatatccataccttaataaaagcaggtaaaaagtgcctggccgtgtatcagcccgaggcatctatgaatttcactctcgctggctgtatttccacgagaagctaccagccaaaatactgcggcgtatgtatggataatcgttgctgtatcccttacaagtccaagactattgacgtgagcttccagtgcccagacggactgggatttagccgccaggttctctggattaatgcatgtttctgtaacctgtcctgtcgcaatcctaacgacatatttgccgatctggagagctaccctgacttctctgagatcgccaac

SEQ ID NO: 4858 - DNA, 1002 bp, Homo Sapiens
ggctacccaatatggtggtctttagctcttgggcagcagtacacctcactgggatctcaacctcttctttgcggcagtattcccggactggtccccaaacaactgagattctgtcgcaactacattgagattatgccatccgtggcggaaggagtgaaactgggcatccaggagtgtcaacaccagttccgcgggcggcggtggaattgtacgaccattgacgattctctggccatcttcggaccagtcttggacaaggctactagagagtccgcatttgtccacgccatcgccagtgcaggcgtcgctttcgccgtcacacgctcatgtgcagagggaacctctaccatttgtggatgtgattctcaccacaagggaccgccgggcgaaggatggaaatggggcggctgctcagaggatgcagacttcggcgtccttgtcagcagggagttcgcagacgctagagagaaccgtccagatgccagatccgccatgaacaaacacaacaatgaagctgggaggacaactatattggaccatatgcaccttaaatgcaaatgtcacggactgagtggaagctgtgaagtgaaaacatgttggtgggcacagcctgattttcgggcgataggagacttccttaaggacaagtacgattctgcctcagagatggtcgttgagaagcaccgtgagtcaagaggctgggtggagactctgcgggccaaatacagtttattcaagccgccaaccgaaagggacctggtgtactatgagaattcacctaacttttgtgagccaaaccccgagacaggctcttttggaaccagagaccggacatgtaatgtgacttcccacgggattgacgggtgtgacctgctctgttgcggaaggggacataacactagaacagagaagaggaaagagaaatgtcattgcatttttcattggtgttgttatgtgagttgccaggagtgcattagaatctatgatgtgcatacctgtaag

SEQ ID NO: 4859 - DNA, 1023 bp, Homo Sapiens
ttgtggtgggccgtcggatctccccttgtcatggacccaacgtctatctgtagaaaagccagaaggctggccgggcgacaggcagagctgtgccaggcggagccagaggtggtggccgagttagcacgaggggcgaggttaggtgtcagagagtgtcagtttcagttccggtttaggaggtggaactgctcctcacacagcaaggcctttggccggattcttcagcaggatattcgagaaacagcctttgtcttcgccattaccgctgcaggcgcttctcatgccgtcactcaggcatgtagcatgggggagctgctccagtgcggatgtcaggcccccagagggcgggcgcctccgcgccccagtggcttgccggggaccccaggtcctccaggccctgcaggtagccctgagggcagcgccgcttgggagtgggggggatgtggggatgacgtggattttggcgacgaaaagagtagactgtttatggatgcccgacacaaacgaggacggggagacatccgtgccctggtgcaattacataacaacgaagccggcagactggccgttcggtcccatacccggaccgagtgcaagtgtcacggcttatctggtagctgcgccctgagaacatgctggcagaagctgcccccgttcagagaagtgggcgctagactgctggagaggtttcacggggcgagtagggtgatgggcacgaatgacggaaaagccctcctgcctgcagtaagaactctcaaacctccaggacgagcggacctgttgtacgccgcagactcccctgatttttgcgccccgaatcgtaggactgggtcccctgggaccagggggcgggcatgtaatagcagcgctcccgacctctcagggtgtgacttgttgtgctgcgggcggggacaccgccaggagtcagtgcagctggaggaaaactgcctctgccgctttcactggtgctgcgtcgttcaatgtcacaggtgtcgcgtgcgtaaggaactgagtctgtgtctc

SEQ ID NO: 4860 - DNA, 981 bp, Homo Sapiens
gtaaacaatttcttgatcaccgggcctaaagcatatctcacatatactacctccgtggcgcttggggctcagtccggaattgaagagtgtaaattccagtttgcctgggaaaggtggaactgccctgaaaacgcccttcagctgtctacacataatcgccttaggagcgccactcgtgagacatcatttatccacgctatctcctccgcaggggtcatgtatatcattaccaagaattgctcaatgggcgacttcgagaactgcgggtgtgacggctctaataatgggaagactggcggtcacgggtggatttggggggggtgttctgataacgtcgagttcggcgagcgcatttctaagctttttgtggactccctggagaaggggaaggacgcgcgggcactgatgaatttgcataataatagagctgggaggctggctgtccgagctacaatgaagcggacatgcaaatgtcacggcatctccggatcttgcagcatccaaacctgctggcttcagttggccgagtttagagaaatgggtgactacctcaaagctaaatacgaccaggcacttaagatcgagatggataagagacaattaagagccgggaatagtgctgagggtcattgggtaccagcagaggcttttctgccctccgctgaggccgagctgattttcctcgaggagtccccggattactgcacttgtaattcatctctggggatttatgggacagagggacgggaatgcttgcaaaactcccataacacttcccggtgggagcgccgctcatgtggccggctctgcactgaatgtggacttcaggtggaggagcgtaaaacggaagttatctcctcttgcaattgtaagttccagtggtgctgtactgtgaaatgcgaccagtgcaggcatgtggtctctaagtactactgcgcgcggagccccgggtccgcacaaagcctggggaagggcagtgcc

SEQ ID NO: 4861 - DNA, 1005 bp, Homo Sapiens
agctatttcgggctgactgggcgcgaggtcctgacacccttccctggcctgggaaccgccgccgcgcccgctcagggtggtgcccacttgaaacagtgcgatctgcttaagctgtctaggcgtcaaaaacagttatgtcggcgcgagcccggcttggccgagacgctgcgagacgcagcccacctgggcctgttagaatgccagtttcaatttcggcatgaaaggtggaactgtagtttagaaggaaggatgggtctgctcaagagaggcttcaaagaaaccgcttttctgtacgcagtgtccagcgcagccctgacccatacactggctagggcgtgcagcgccgggaggatggagagatgcacatgcgatgactcccccggcttagaatcacgacaggcatggcagtggggcgtgtgtggcgataatttgaagtattcaaccaagttcctgtcaaattttctcgggtcaaagcgtggaaacaaagacttgcgcgccagggcggacgcccataacacccatgttgggattaaagctgttaagtcaggacttagaacaacctgtaaatgtcatggcgtgtccggcagttgcgcagtgagaacctgctggaaacagctgagtccctttagggagaccggacaagttctgaaactgcgctatgatagtgcggttaaggtgagttccgccactaacgaggctcttggcagactggagctgtgggcgccagcaaggcaaggctcacttacgaaaggccttgctcctaggtcaggtgatctggtctacatggaagacagcccctcattctgccgtcctagcaagtactcacccggaaccgctggtcgtgtctgttctcgggaggccagctgctcctccctgtgctgcggtcgggggtatgatacccaaagcaggctcgttgccttcagttgtcactgccaggtgcagtggtgttgttacgtcgagtgtcaacaatgtgttcaggaagagctggtgtacacctgcaagcac

SEQ ID NO: 4862 - DNA, 1095 bp, Homo Sapiens
cagcctttgtggcttctccagggaggcgcctctcaccctgaaacaagcgtgcagccagtattggtagagtgccaggaggctaccctgatggttatggtgtctaaggacttgttcgggacaggaaaactgatcagggctgctgacctcacacttggcccggaggcatgtgagccgctggtttccatggacacagaggatgtggtccggtttgaggttggcctgcacgaatgcggcaacagtatgcaggtgacagacgatgccttggtctacagcacttttctgctgcatgacccgcgcccagtggggaacttatccatcgtgcgtactaacagggccgaaatccctatcgaatgccggtatcccagacagggaaacgtctcttctcaggccatcctgccgacctggctgcccttcaggaccaccgtgttttctgaggagaagttgactttctctctgcgactgatggaggagaattggaacgccgaaaaacgctctccaactttccacctcggggatgctgcgcacctgcaagctgagatccataccggcagccatgtgccactgcggctgtttgtggaccactgcgtcgctacgccaactcctgaccagaacgcgtccccttatcatacgattgtcgactttcacggatgtttagttgacggacttacggacgcctcctccgcgttcaaggtgccccgtccaggcccagacactctccagtttaccgtcgacgttttccactttgctaacgacagccggaatatgatttacatcacttgccacttgaaggttactttggcggaacaggatccagacgagcttaacaaggcgtgtagcttcagtaagcctagtaatagctggttcccagtggaaggctctgctgatatttgtcagtgctgtaataagggggattgtggaacccctagccattcccgacgacagcctcatgtgatgtcccagtggtcacgcagcgctagccggaaccgcagacatgtgacagaggaagcggatgtgaccgtcggaccattgatttttctggaccgcagaggggaccacgaagtcgagcagtgggcgcttccctcagatactagtgtg

SEQ ID NO: 4863 - DNA, 1461 bp, Homo Sapiens
ggccaacataagcccgaagcgccagactactcttctgtgctgcactgtggcccatggagttttcaatttgctgtcaatctcaatcaggaggccaccagccccccagtgctgatagcctgggataatcagggtctgcttcatgagctgcagaacgatagtgactgcgggacttggatccgcaagggcccaggcagttctgtggtacttgaagcaacttacagcagctgctatgtcactgaatgggactcccattacataatgccagtgggggtggagggagctggcgctgccgagcacaaagtggtcactgaaaggaagttactgaagtgtcccatggacctgctggctagggatgcacctgatacagactggtgtgactcaatccctgctcgcgacagactcccatgcgcacccagccccattagtcgcggggactgtgaagggttaggttgttgctatagttctgaggaggtcaactcctgctactacggtaataccgtcacactgcactgcacaagggaaggacactttagtattgctgtgagccggaatgtgacctctccgccccttcttctcgactccgttagactggccctcaggaacgactcagcatgcaaccccgttatggccactcaagcattcgtgctcttccaattcccatttacatcctgcggtaccactagacagattaccggggaccgcgctgtgtacgaaaacgagttagttgccacaagagacgtcaagaatgggagccggggctccgtgacacgtgattcaatcttccgactgcacgtgagctgctcctactctgtcagcagcaatagcctgccgatcaacgtacaggtttttacgctgcccccgccatttccggaaacccagcctgggccactgaccttagagctgcagatagcaaaggacaaaaattatgggtcttactacggggtcggagactatcccgttgtgaaactgctgagggacccgatatacgtcgaggtgtctatcctccaccgcactgatccttacttggggctgttactgcagcagtgctgggccactccttcaaccgacccactctctcaaccacagtggccaatcctcgtaaaaggttgtccttacatcggggataattatcagacccagttgatccctgtgcagaaggcattggacctgccttttccatcacaccatcagaggttctcaattttcacgttttccttcgtgaacccaaccgtggaaaagcaggccctccggggccccgtccatttgcactgctccgtctctgtgtgccagccagcagaaacccccagttgcgtggtgacatgtcccgatctgagccgccggagaaatttcgacaatagctcacagaataccacggcctcagtctcctccaagggccctatgattctgttacaggcaaccaaagatccgccagaaaaactgagggtgccagtggattccaag

SEQ ID NO: 4864 - DNA, 801 bp, Homo Sapiens
atcctgggcggcgtccctgcgcccgagaggaagtggccgtggcaggtcagcgtgcactacgcaggcctccacgtctgcggcggctccatcctcaatgagtactgggtgctgtcagctgcgcactgctttcacagggacaagaatatcaaaatctatgacatgtacgtaggcctcgtaaacctcagggtggacggcaaccacacccagtggtatgaggtgaacagggtgatcctgcaccccacatatgagatgtaccaccccatcggaggtgacgtggccctggtgcagctgaagacccgcattgtgttttctgagtccgtgctcccggtttgccttgcaactccagaagtgaaccttaccagtgccaattgctgggctacgggatggggactagtctcaaaacaaggtgagacctcagacgagctgcaggaggtgcagctcccgctgatcctggagccctggtgccacctgctctacggacacatgtcctacatcatgcccgacatgctgtgtgctggggacatcctgaatgctaagaccgtgtgtgagggcgactccgggggcccacttgtctgtgaattcaaccgcagctggttgcagattggaattgtgagctggggccgaggctgctccaaccctctgtaccctggagtgtatgccagtgtttcctatttctcaaaatggatatgtgataacatagaaatcacgcccactcctgctcagccagcccctgctctctctccagctctggggcccactctcagcgtcctaatggccatgctggctggctggtcagtgctg

SEQ ID NO: 4865 - DNA, 294 bp, Homo Sapiens
tcactttctccaacaaaatacaaccttttggagctcaaggagtcttgcatccggaaccaggactgcgagactggctgctgccaacgtgctccagacaattgcgagtcgcactgcgcggagaaggggtccgagggcagtctgtgtcaaacgcaggtgttctttggccaatatagagcgtgtccctgcctgcggaacctgacttgtatatattcaaagaatgagaaatggcttagcatcgcctatggccgttgtcagaaaattggaaggcagaagttggctaagaaaatgttcttc

SEQ ID NO: 4866 - DNA, 2976 bp, Homo Sapiens
ctccgagggtcgaggaagctcacagccgctgcccctggggctgtcccacacacatccactgaaacccaggcaagcagatgcaagaaaggattctctcaggacaaacagtgcttccttctctctggtaatgcccaggaaaccagaaaggtcaaagaatcaatggagacacactttggcagccatggccgaagggccatactctacaggcctcctttctacagcaaaacagagcttcagctacaccagcacattctgactcaacatggctatacggttgtcatcgctgaagaaaggctcaatgctggcctagggccggggctactagaacaaggtgatctgggctcttgggatctgctcatttgcctgtcttctaagaaagcagaaggaacaccctgtatatccaaggaagtcatgtgccagttaggtttacatcaaaaggcaaacagattaccagaaatacagcagccactttgcagaaaggaaggattatgtcaaatagttagaagattcccagaactgcaacttccagtgagtccctctgtgtgtctggatcagggaatgcaattaaagccgagtacttcgagtcaccttttaaaaacagtgaagccacgtgtgtggaaaccaggggactggagtcgtgaacagctgaatgaaacgacagtccttgctccacatgaaacaatctttcgagccgaagatctatctgtgattcttaaagcgtatgtgttggtgacgtccttaacccctttgcgtgcattcattcattcgacgggcacagtttggaatccaccaaagaaaaaacgcttcactgtcaagctgcaaacattttttgagacattcctgagagccagttcacctcaacaggcttttgacattatgaaggaagcaattggcaaactactgctagcggctgaagtattcagtgaaacatctactctgggaccaaagaccttccatagatgcagattctgctttcaacttctaacttttgatattggttatggcagtttcatgtaccctgtagtgctccaggtacacgagcatttaaattttcaagattatgataatatggattttgaggaccaaaatacagaagaattccttttaaatgacactttcaattttctcttccctaatgaatcatcactttccatattttctgagatatttcagagactttataggtcagatgttttcaagggcgaaaactatcaaaaggaactaaatcagtgtctgtccttagaagaaattaactcaattatgactttcataaaggaacttggaagtctgggacaattccaactgctcttcccatctactactcctgggattcagtcactgatgcatgaattttatgatgtggcaaatcctgtgggaaatcctggctcagtcctgacccaatactggtctcttttaaatgtatttgaacaatttcagttcatgaataaaaagacacagccacatccactggaatggaattctttcacagaagataagaacattgaaaaaccacaagtgccatttgatgcaatagaaaataaaaaagctgcagttccacaaattaaaaatgaaaataaagaaatacattgcagtgatgatgaaaacacaccatgtcatatcaagcagatcttcacacatccacatttggaactaaatcctgactttcatccaaagatcaaagattattactgtgaagtcccatttgatgtggtaacagtgacaattggagtggaaactcctaagtgtctgtgcaaggtgcacctgtacgagcaggcagggccaagctttgccagctaccctctgggcttaggaatgaacaaaatctcaatatttgttgtggatgaatctccagcacacggtgagactctgatcacgtacaaactcaccatctatagagaagaccgcccaagtctgcccttgtttgaggccttcacagcatgtggttttgtgcaggattgtggtttgctgattcatccagaggaaacctgtgggttacagcctatttcttctgactacattggagccattttacagtctgaactaaaaagatgtccatctggggacatgaaaggccagtggattgtgccttgccttagttgttcggacaacaggacgtgtgactggagagaaataacctggcagccccacaactgccaatatggtgtcctaactaagcctcaactccagcagtgcctgggaggaaggaagattctgttcattggagattcaaccaacagagggatcatgtactatcttattgaaaggctgaatgaaacgttgcaggaatggcagaaagtacatggcactaaattctatcacaacgtcaatggtgggaagactttgatcagttattcctactatccccagttctggataagcccttcattgagaccaacatttgaaaatgcacttgaacacctcttgcaaagatcacgtcccctagagaatactggccagactgtattggttgttggtggtgttcagtggcttaattccaatcacctgcaaattattcacaaagttttgaagagggaaaatttactcaatatcctagtgatcatcaaaactttgggaattggatttcatctgccagtggatggagtacatttcttaacacagagtgaagtacagaacttatggaaagaaaatttgattattctggatactgcaaaaaaacatggctatgaagtagttgacacattcactataacaatggggcgttacaaagagtttctacaggggaagtgtggatgtcatttccatgaggtagtgaaatcaaagttatccaaagaatataactttattaaaatgaaaagatcaagaaatcatatcatgggaagatatttcagcaatcaaagcaaactacaacaaggcactgtaacaaattttcgatcgccatatcatgtcagaggtccaataaatcaggtttgttctgaaatccttctcagcaggatgtgtgcaaataaaaggactatg

SEQ ID NO: 4867 - DNA, 648 bp, Homo Sapiens
tctgttcagaaagaagaccctgctccctatttggtgtacctcaagtctcacttcaacccctgtgtgggcgtcctcatcaaacccagctgggtgctggccccagctcactgctatttaccaaatctgaaagtgatgctgggaaatttcaagagcagagtcagagacggtactgaacagacaattaaccccattcagatcgtccgctactggaactacagtcatagcgccccacaggatgacctcatgctcatcaagctggctaagcctgccatgctcaatcccaaagtccagccccttaccctcgccaccaccaatgtcaggccaggcactgtctgtctactctcaggtttggactggagccaagaaaacagtggccgacaccctgacttgcggcagaacctggaggcccccgtgatgtctgatcgagaatgccaaaaaacagaacaaggaaaaagccacaggaattccttatgtgtgaaatttgtgaaagtattcagccgaatttttggggaggtggccgttgctactgtcatctgcaaagacaagctccagggaatcgaggtggggcacttcatgggaggggacgtcggcatctacaccaatgtttacaaatatgtatcctggattgagaacactgctaaggacaag

SEQ ID NO: 4868 - DNA, 669 bp, Homo Sapiens
gttactttcaccatcaattgctcagggtttggccagcacggggcggatcccactactctgaattcagtgtttaatagaaagcccttccgtccggtcaccaacatcagcgtccccacccaagtcaacatctccttcgcgatgtctgccatcctagatgtgaatgaacagctgcacctcttgtcatcattcctgtggctggaaatggtttgggataacccatttatcagctggaacccagaggaatgtgagggcatcacgaagatgagtatggcagccaagaacctgtggctcccagacattttcatcattgaactcatggatgtggataagaccccaaaaggcctcacagcatatgtaagtaatgaaggtcgcatcaggtataagaaacccatgaaggtggacagtatctgtaacctggacatcttctacttccccttcgaccagcagaactgcacactcaccttcagctcattcctctacacagtggacagcatgttgctggacatggagaaagaagtgtgggaaataacagacgcatcccggaacatccttcagacccatggagaatgggagctcctgggcctcagcaaggccaccgcaaagttgtccaggggaggcaacctgtatgatcagatcgtgttctatgtggccatcaggcgcaggcccagc

SEQ ID NO: 4869 - DNA, 879 bp, Homo Sapiens
ctcctcttcatttaccaagaggtgtccaggctgtggtcaaagtcagctgtgcagaacaaagtggtggtgatcaccgatgccatctcaggactgggcaaggagtgtgctcgggtgttccacacaggtggggcaaggctggtgctgtgtggaaagaactgggagaggctagagaacctatatgatgccttgatcagcgtggctgaccccagcaagacattcaccccaaagctggtcctgttggacctctcagacatcagctgtgtcccagatgtggcaaaagaagtcctggattgctatggctgtgtggacatcctcatcaacaatgccagtgtgaaggtgaaggggcctgcccataagatttctctggagctcgacaaaaagatcatggatgccaattactttggccccatcacattgacgaaagccctgcttcccaacatgatctcccggagaacaggccaaatcgtgttagtgaataatatccaagggaagtttggaatcccgttccgtacgacttacgctgcctccaagcacgcagccctgggcttctttgactgcctccgagccgaagtggaggaatacgatgttgtcatcagcaccgtgagcccgactttcatccggtcgtaccacgtgtatccagagcaaggaaactgggaagcttccatttggaaattctttttcaggaagctgacctacggcgtgcacccagtagaggtggcggaggaggtgatgcgcaccgtgcggaggaagaagcaagaggtgtttatggccaaccccatccccaaggccgccgtgtacgtccgcaccttcttcccggagttctttttcgccgtggtggcctgtggggtgaaggagaagctcaatgtcccggaggagggg

SEQ ID NO: 4870 - DNA, 2679 bp, Homo Sapiens
aattcactcattcagctgaacaacaatggctatgaaggcattgtcgttgcaatcgaccccaatgtgccagaagatgaaacactcattcaacaaataaaggacatggtgacccaggcatctctgtatctgtttgaagctacaggaaagcgattttatttcaaaaatgttgccattttgattcctgaaacatggaagacaaaggctgactatgtgagaccaaaacttgagacctacaaaaatgctgatgttctggttgctgagtctactcctccaggtaatgatgaaccctacactgagcagatgggcaactgtggagagaagggtgaaaggatccacctcactcctgatttcattgcaggaaaaaagttagctgaatatggaccacaaggtagggcatttgtccatgagtgggctcatctacgatggggagtatttgacgagtacaataatgatgagaaattctacttatccaatggaagaatacaagcagtaagatgttcagcaggtattactggtacaaatgtagtaaagaagtgtcagggaggcagctgttacaccaaaagatgcacattcaataaagtaacaggactctatgaaaaaggatgtgagtttgttctccaatcccgccagacggagaaggcttctataatgtttgcacaacatgttgattctatagttgaattctgtacagaacaaaaccacaacaaagaagctccaaacaagcaaaatcaaaaatgcaatctccgaagcacatgggaagtgatccgtgattctgaggactttaagaaaaccactcctatgacaacacagccaccaaatcccaccttctcattgctgcagattggacaaagaattgtgtgtttagtccttgacaaatctggaagcatggcgactggtaaccgcctcaatcgactgaatcaagcaggccagcttttcctgctgcagacagttgagctggggtcctgggttgggatggtgacatttgacagtgctgcccatgtacaaaatgaactcatacagataaacagtggcagtgacagggacacactcgccaaaagattacctgcagcagcttcaggagggacgtccatctgcagcgggcttcgatcggcatttactgtgattaggaagaaatatccaactgatggatctgaaattgtgctgctgacggatggggaagacaacactataagtgggtgctttaacgaggtcaaacaaagtggtgccatcatccacacagtcgctttggggccctctgcagctcaagaactagaggagctgtccaaaatgacaggaggtttacagacatatgcttcagatcaagttcagaacaatggcctcattgatgcttttggggccctttcatcaggaaatggagctgtctctcagcgctccatccagcttgagagtaagggattaaccctccagaacagccagtggatgaatggcacagtgatcgtggacagcaccgtgggaaaggacactttgtttcttatcacctggacaatgcagcctccccaaatccttctctgggatcccagtggacagaagcaaggtggctttgtagtggacaaaaacaccaaaatggcctacctccaaatcccaggcattgctaaggttggcacttggaaatacagtctgcaagcaagctcacaaaccttgaccctgactgtcacgtcccgtgcgtccaatgctaccctgcctccaattacagtgacttccaaaacgaacaaggacaccagcaaattccccagccctctggtagtttatgcaaatattcgccaaggagcctccccaattctcagggccagtgtcacagccctgattgaatcagtgaatggaaaaacagttaccttggaactactggataatggagcaggtgctgatgctactaaggatgacggtgtctactcaaggtatttcacaacttatgacacgaatggtagatacagtgtaaaagtgcgggctctgggaggagttaacgcagccagacggagagtgataccccagcagagtggagcactgtacatacctggctggattgagaatgatgaaatacaatggaatccaccaagacctgaaattaataaggatgatgttcaacacaagcaagtgtgtttcagcagaacatcctcgggaggctcatttgtggcttctgatgtcccaaatgctcccatacctgatctcttcccacctggccaaatcaccgacctgaaggcggaaattcacgggggcagtctcattaatctgacttggacagctcctggggatgattatgaccatggaacagctcacaagtatatcattcgaataagtacaagtattcttgatctcagagacaagttcaatgaatctcttcaagtgaatactactgctctcatcccaaaggaagccaactctgaggaagtctttttgtttaaaccagaaaacattacttttgaaaatggcacagatcttttcattgctattcaggctgttgataaggtcgatctgaaatcagaaatatccaacattgcacgagtatctttgtttattcctccacagactccgccagagacacctagtcctgatgaaacgtctgctccttgtcctaatattcatatcaacagcaccattcctggcattcacattttaaaaattatgtggaagtggataggagaactgcagctgtcaatagcc

SEQ ID NO: 4871 - DNA, 294 bp, Homo Sapiens
atccggctggtgcccccgtacccaagcagccaagaggaccccatccacatcgcatgcatggcccctgggaacttcccgggggcgaatttcacactgtatcgaggggggcaggtggtccagctcctgcaggcccccacggaccagcgcggggtgacatttaacctgagcggcggcagcagcaaggctccagggggacccttccactgccagtatggagtgttaggtgagctcaaccagtcccagctgtcagacctcagcgagcccgtgaacgtctccttcccagtgcccacttgg

SEQ ID NO: 4872 - DNA, 942 bp, Homo Sapiens
caggacacctgcaggcaagggcaccctggaatccctgggaaccccggtcacaatggtctgcctggaagagatggacgagacggagcgaagggtgacaaaggcgatgcaggagaaccaggatgtcctggcagcccggggaaggatgggacgagtggagagaagggagaacgaggagcagatggaaaagttgaagcaaaaggcatcaaaggtgatcaaggctcaagaggatccccaggaaaacatggccccaaggggcttgcagggcccatgggagagaaaggcctccgaggagagactgggcctcaggggcagaaggggaataagggtgacgtgggtcccactggtcctgaggggccaaggggcaacattgggcctttgggcccaactggtttaccgggccccatgggccctattggaaagcctggtcccaagggagaagctggacccacggggccccagggtgagccaggagtccggggaataagaggctggaaaggagatcgaggagagaaagggaaaatcggtgagactctagtcttgccaaaaagtgctttcactgtggggctcacggtgctgagcaagtttccttcttcagatgtgcccattaaatttgataagatcctgtataacgaattcaaccattatgatacagcagtggggaaattcacgtgccacattgctggggtctattacttcacctaccacatcactgttttctccaggaatgttcaggtgtctttggtcaaaaacggagtaaaaatactgcacaccagagatgcttacgtgagctctgaggaccaggcctctggcagcattgtcctgcagctgaagctcggggatgagatgtggctgcaggtgacaggaggagagaggttcaatggcttgtttgctgatgaggacgatgacacaactttcacagggttccttctgttcagcagccag

SEQ ID NO: 4873 - DNA, 603 bp, Homo Sapiens
gctgctatcagtcatgaagactatcctgctgatgaaggtgaccagatctccagtaatgacaatctgatctttgatgactatcgagggaaagggtgtgtcgatgacagcggctttgtatacaagttgggagaacgatttttccctgggcattccaactgtccatgtgtctgtgctctagatggacctgtttgcgaccaaccagaatgccctaaaattcacccaaagtgtactaaagtggaacacaatggatgctgtcctgagtgcaaagaagtaaaaaacttctgtgaatatcacgggaaaaattacaaaatcttggaggaatttaagccctctccatgtgaatggtgtcgctgtgagcccagcaatgaagttcactgtgttgtagcagactgcgcagttcctgagtgtgtcaacccagtctatgaaccagaacaatgttgtcctgtctgcaaaaatggtccaaactgctttgcaggaacgacgataattccagctggcattgaagtgaaagtggacgaatgtaacatctgtcattgtcacaacggggactggtggaagcctgctcagtgttcgaaacgtgaatgccaaggcaagcagactgtg

SEQ ID NO: 4874 - DNA, 405 bp, Homo Sapiens
gacctggacactgcagccaggcgaggccagcaccaggtcccccagcaccgcgggcacgtctgctacctgggcgtatgccggacccaccgcctggcggagatcatatactggattcgctgtctccaccaaggagccctcggggaaggccagccacgagccccaggacccctacagctatgggcgccgccggtggcgcgaggcggaagcccggctcggttcccaggattccggcctgcagcgagggggctagcgcagtgcccagctcgctgggtgacctcgggcacggctcgtcccctcctcggcttcagtttgcctatctgtatgttggagcttctactccacatttcttctcccctaactccagcccctgaaaccgtcttccccagtccctccccgggctgcgac

SEQ ID NO: 4875 - DNA, 1026 bp, Homo Sapiens
tgctacggggactccgggcagcctgtagactggttcgtggtctacaagctgccagctcttagagggtccggggaggcggcgcagagagggctgcagtacaagtatctggacgagagctccggaggctggcgggacggcagggcactcatcaacagcccggagggggccgtgggccgaagcctgcagccgctgtaccggagcaacaccagccagctcgccttcctgctctacaatgaccaaccgcctcaacccagcaaggctcaggactcttccatgcgtgggcacacgaagggtgtcctgctccttgaccacgatgggggcttctggctggtccacagtgtacctaacttccctccaccggcctcctctgctgcatacagctggcctcatagcgcctgtacctacgggcagaccctgctctgtgtgtcttttcccttcgctcagttctcgaagatgggcaagcagctgacctacacctacccctgggtctataactaccagctggaagggatctttgcccaggaattccccgacttggagaatgtggtcaagggccaccacgttagccaagaaccctggaacagcagcatcacactcacatcccaggccggggctgttttccagagctttgccaagttcagcaaatttggagatgacctgtactccggctggttggcagcagcccttggtaccaacctgcaggtccagttctggcacaaaactgtaggcatcctgccctctaactgctcggatatctggcaggttctgaatgtgaaccagatagctttccctggaccagccggcccaagcttcaacagcacagaggaccactccaaatggtgcgtgtccccaaaagggccctggacctgcgtgggtgacatgaatcggaaccagggagaggagcaacggggtgggggcacactgtgtgcccagctgccagccctctggaaagccttccagccgctggtgaagaactaccagccctgtaatggcatggccaggaagcccagcagagcttataagatc

SEQ ID NO: 4876 - DNA, 621 bp, Homo Sapiens
ctggagatcggccgcttcgacccggagcgcgggcgcggggctgcgccgtgccaggcggtggagatccccatgtgccgcggcatcggctacaacctgacccgcatgcccaacctgctgggccacacgtcgcagggcgaggcggctgccgagctagcggagttcgcgccgctggtgcagtacggctgccacagccacctgcgcttcttcctgtgctcgctctacgcgcccatgtgcaccgaccaggtctcgacgcccattcccgcctgccggcccatgtgcgagcaggcgcgcctgcgctgcgcgcccatcatggagcagttcaacttcggctggccggactcgctcgactgcgcccggctgcccacgcgcaacgacccgcacgcgctgtgcatggaggcgcccgagaacgccacggccggccccgcggagccccacaagggcctgggcatgctgcccgtggcgccgcggcccgcgcgccctcccggagacctgggcccgggcgcgggcggcagtggcacctgcgagaaccgcgagaagttccagtacgtggagaagagccgctcgtgcgcaccgcgctgcgggcccggcgtcgaggtgttctggtcccggcgcgacaaggac

SEQ ID NO: 4877 - DNA, 186 bp, Homo Sapiens
tcctcggtggagctgccctatgaggacctgctgcgccaggagctgcgcaagctgaagcgacgcttcttggaggagcacgagtgcctgtctgagcagcagctggagcagttcctgggccgggtgctggaggccagcaactacggcgtgtcggtgctcagcaacgcctcgggcaactggaactgggac

SEQ ID NO: 4878 - DNA, 1068 bp, Homo Sapiens
atggccttcagcggttgccaggctccctatctgagcccagccgtccccttttctgggactatccaagggggtctccaggacggatttcagatcactgtcaatggggccgttctcagctgcagtggaaccaggtttgctgtggactttcagacgggcttcagtggaaacgacattgccttccacttcaaccctcggtttgaagacggagggtatgtggtgtgcaacacgaggcagaaaggaacatgggggcccgaggagaggaagatgcacatgcccttccagaaggggatgccctttgacctctgcttcctggtgcagagctcagatttcaaggtgatggtgaacgggagcctcttcgtgcagtacttccaccgcgtgcccttccaccgtgtggacaccatctccgtcaatggctctgtgcagctgtcctacatcagcttccagaatccccgcgcagtccccgttcagcctgccttctccacggtgccgttctcccagcctgtctgtttcccacccaggcccagggggcgcagacaaaaacctcccatcgtgcggcctgccaacccagctcccattacccagacagtcatccacacggtgcagagtgcctctggacagatgttctctcagactcccgccatcccacctatgatgtacccccaccctgcctatccgatgcctttcatcaccaccattccgggagggctgtacccatccaagtccatcatcctgtcaggcactgtcctgcccagtgctcagaggttccacatcaacctgtgctctgggagccacatcgccttccacatgaacccccgttttgatgagaatgctgtggtccgtaacacccagatcaacaactcttgggggtctgaggagcgaagtctgccccgaaaaatgcccttcgtccgaggccagagcttctcggtgtggatcttgtgtgaagctcactgcctcaaggtggccgtggatggtcagcacgtgtttgaatactaccatcgcctgaggaacctgcccaccatcaacaaactggaagtgggtggcgacatccagctgacccacgtgcagaca

SEQ ID NO: 4879 - DNA, 150 bp, Homo Sapiens
tcctcacgtcgctgcgtaaggctgcatgagtcctgcctgggacagcaggtgccttgctgtgacccatgtgccacgtgctactgccgcttcttcaatgccttctgctactgccgcaagctgggtactgccatgaatccctgcagccgcacc

SEQ ID NO: 4880 - DNA, 870 bp, Homo Sapiens
aggttcagccagagcttccgagaggtggccggcaggttcctggcgtcggaggccagcacacacctgctggtgttcggcatggagcagcggctgccgcccaacagcgagctggtgcaggccgtgctgcggctcttccaggagccggtccccaaggccgcgctgcacaggcacgggcggctgtccccgcgcagcgcccaggcccgggtgaccgtcgagtggctgcgcgtccgcgacgacggctccaaccgcacctccctcatcgactccaggctggtgtccgtccacgagagcggctggaaggccttcgacgtgaccgaggccgtgaacttctggcagcagctgagccggccccggcagccgctgctgctacaggtgtcggtgcagagggagcatctgggcccgctggcgtccggcgcccacaagctggtccgctttgcctcgcagggggcgccagccgggcttggggagccccagctggagctgcacaccctggacctcagggactatggagctcagggcgactgtgaccctgaagcaccaatgaccgagggcacccgctgctgccgccaggagatgtacattgacctgcaggggatgaagtgggccaagaactgggtgctggagcccccgggcttcctggcttacgagtgtgtgggcacctgccagcagcccccggaggccctggccttcaattggccatttctggggccgcgacagtgtatcgcctcggagactgcctcgctgcccatgatcgtcagcatcaaggagggaggcaggaccaggccccaggtggtcagcctgcccaacatgagggtgcagaagtgcagctgtgcctcggatggggcgctcgtgccaaggaggctccagcca

SEQ ID NO: 4881 - DNA, 1560 bp, Homo Sapiens
atgtctcaggataatgacacattgatgagagacatcctggggcatgagctcgctgctatgaggctgcagaagctggaacagcagcggcggctgtttgaaaagaagcagcgacagaagcgccaggagctcctcatggttcaggccaatcctgacgcttccccgtggctttggcgctcttgtctgcgggaggagcgccttttaggtgacagaggccttgggaaccctttcctccggaagaaagtgtcagaggcacatctgccctctggcatccacagtgccctgggcaccgtgagctgtggtggagacggcaggggcgagcgcggcctcccgacaccgcggacagaagcagtgttcaggaatctcggtctccagtcccctttcttatcctggctcccagacaattccgatgcagaattggaggaagtctccgtggagaatggttccgtctctcccccaccttttaaacagtctccgagaatccgacgcaagggttggcaagcccaccaacgacctgggacccgtgcagagggtgagagtgactcccaggatatgggagatgcacacaagtcacccaatatgggaccaaaccctggaatggatggtgactgtgtatatgaaaacttggccttccaaaaggaagaagacttggaaaagaagagagaggcctctgagtctacagggacgaactcctcagcagcacacaacgaagagttgtccaaggccctgaaaggcgagggtggcacggacagcgaccatatgaggcacgaagcctccttggcaatccgctccccctgccctgggctggaggaggacatggaagcctacgtgctgcggccagcgctcccgggcaccatgatgcagtgctacctcacccgtgacaagcacggcgtggacaagggcttgttccccctctactacctctacctggagacctctgacagcctgcagcgcttcctcctggctgggcgaaagagaagaaggagcaaaacttctaattacctcatctccctggatcctacacacctatctcgggacggggacaatttcgtgggcaaagtcagatccaatgtcttcagcaccaagttcaccatctttgacaatggggtgaatcctgaccgggagcatttaaccaggaatactgcccggatcagacaggagctgggggctgtgtgttatgagcccaacgtcttaggatacctggggcctcggaaaatgactgtgattctcccaggaaccaacagccagaaccagcgaatcaatgtccagccactaaatgaacaggagtcgctactgagtcgttaccaacgtggggacaaacaagggttgcttttgttgcacaacaaaaccccgtcgtgggacaaggagaacggtgtctacacgctcaatttccatggtcgagtcactcgggcttcggtgaagaacttccaaatcgtggatcccaaacaccaagaacatctggtgctccagttcggccgagtgggcccagacacattcaccatggacttctgctttccatttagcccgctccaggccttcagcatctgcttgtccagtttcaat

SEQ ID NO: 4882 - DNA, 1551 bp, Homo Sapiens
atggctgtcagcaggaaggactggtccgcgctgtccagccttgcccggcagaggactctggaggatgaggaggaacaggagcgcgagcgcaggcggcggcaccgcaacctgagctccaccacggacgatgaggctcccaggctcagccagaatggagaccggcaggcctctgcttctgagagactaccgagcgtggaagaagcagaggtgcccaagccactgcccccagcctccaaagatgaggacgaggacatccagagcatcctcagaacacggcaggagcggaggcagaggcggcaggtggtggaggctgcacaggcccccatccaggagaggctggaggcagaggaggggaggaacagcttgagccctgtgcaggccacacagaaacccctagtctccaagaaggaactggaaatcccacctcgccggagactgagtcgggaacagcggggcccctgggccctggaggaggagagcttggtgggcagggagccagaagagaggaagaaaggggttccagaaaagtccccagtcttggagaagtcctccatgccaaagaagacggcacctgaaaagagcctggtctccgataaaacctccatctctgagaaggtgctggcctcagagaagacatctctatcagagaagatagcagtgtcagagaaaagaaacagctcagagaagaagtctgttctagaaaaaaccagtgtctctgagaagtcgctggccccagggatggcactgggctcaggaaggaggctggtgtctgagaaagcttccatctttgagaaggcactggcctcagagaagagcccaactgcagatgctaagccggccccaaagagggccacagcctcagagcagcccctggcgcaggagccgccagcctctgggggaagcccagccaccaccaaggagcagagaggaagggccctccctgggaagaacctgccctctttggcaaagcagggggcttcagaccctccgactgtggcctcccgcctcccacccgtcacactccaggtgaaaatccccagcaaggaggaagaggcagatatgtcctcacccacacagcgaacctacagcagctccctcaaacgctccagccccaggaccatctcctttcggatgaaacccaagaaagaaaactcggaaacaaccctaactcgcagtgccagcatgaagctcccagacaacacagtgaagttgggagagaagctggagagataccacacggccatacggagatcagaatctgtcaagtctcggggtctgccttgcactgagttattcgtggctcctgtgggtgtagccagcaagcgccacctctttgagaaggaactggcgggccagagccgagcagaaccagcctccagccggaaggagaacttgaggctctcaggggttgtgacatcaaggctcaacctgtggatcagcaggacccaggaatctggagatcaggacccccaggaggcacagaaagcatcatctgcaaccgagaggactcagtggggacagaaatctgactcctcgctggacgctgaggtg

SEQ ID NO: 4883 - DNA, 891 bp, Homo Sapiens
tctctctatccatctctcgaagacttgaaggtagacaaagtaattcaggctcaaactgctttttctgcaaaccctgccaatccagcaattttgtcagaagcttctgctcctatccctcacgatggaaatctctatcccagactgtatccagagctctctcaatacatggggctgagtttaaatgaagaagaaatacgtgcaaatgtggccgtggtttctggtgcaccacttcaggggcagttggtagcaagaccttccagtataaactatatggtggctcctgtaactggtaatgatgttggaattcgtagagcagaaattaagcaagggattcgtgaagtcattttgtgtaaggatcaagatggaaaaattggactcaggcttaaatcaatagataatggtatatttgttcagctagtccaggctaattctccagcctcattggttggtctgagatttggggaccaagtacttcagatcaatggtgaaaactgtgcaggatggagctctgataaagcgcacaaggtgctcaaacaggcttttggagagaagattaccatgaccattcgtgacaggccctttgaacggacgattaccatgcataaggatagcactggacatgttggttttatctttaaaaatggaaaaataacatccatagtgaaagatagctctgcagccagaaatggtcttctcacggaacataacatctgtgaaatcaatggacagaatgtcattggattgaaggactctcaaattgcagacatactgtcaacatctgggactgtagttactattacaatcatgcctgcttttatctttgaacatattattaagcggatggcaccaagcattatgaaaagcctaatggaccacaccattcctgaggtt

SEQ ID NO: 4884 - DNA, 696 bp, Homo Sapiens
gacaagcgcctgcgtgacaaccatgagtggaaaaaactaattatggttcagcactggcctgagacagtatgcgagaaaattcaaaacgactgtagagaccctccggattactggacaatacatggactatggcccgataaaagtgaaggatgtaatagatcgtggcccttcaatttagaagagattaaggatcttttgccagaaatgagggcatactggcctgacgtaattcactcgtttcccaatcgcagccgcttctggaagcatgagtgggaaaagcatgggacctgcgccgcccaggtggatgcgctcaactcccagaagaagtactttggcagaagcctggaactctacagggagctggacctcaacagtgtgcttctaaaattggggataaaaccatccatcaattactaccaagttgcagattttaaagatgcccttgccagagtatatggagtgatacccaaaatccagtgccttccaccaagccaggatgaggaagtacagacaattggtcagatagaactgtgcctcactaagcaagaccagcagctgcaaaactgcaccgagccgggggagcagccgtcccccaagcaggaagtctggctggcaaatggggccgccgagagccggggtctgagagtctgtgaagatggcccagtcttctatcccccacctaaaaagaccaagcat

SEQ ID NO: 4885 - DNA, 150 bp, Homo Sapiens
atggccgccactgcctctccgcagccactcgccactgaggatgccgattctgagaatagcagcttctattactatgactacctggatgaagtggccttcatgctctgcaggaaggatgcagtggtgtcctttggcaaagtcttcctccca

SEQ ID NO: 4886 - DNA, 678 bp, Homo Sapiens
gagaggatgtgcatccaggggagtcagttcaacgtcgaggtcggcagaagtgacaagctttccctgcctggctttgagaacctcacagcaggatataacaaatttctcaggcccaattttggtggagaacccgtacagatagcgctgactctggacattgcaagtatctctagcatttcagagagtaacatggactacacagccaccatatacctccgacagcgctggatggaccagcggctggtgtttgaaggcaacaagagcttcactctggatgcccgcctcgtggagttcctctgggtgccagatacttacattgtggagtccaagaagtccttcctccatgaagtcactgtgggaaacaggctcatccgcctcttctccaatggcacggtcctgtatgccctcagaatcacgacaactgttgcatgtaacatggatctgtctaaataccccatggacacacagacatgcaagttgcagctggaaagctggggctatgatggaaatgatgtggagttcacctggctgagagggaacgactctgtgcgtggactggaacacctgcggcttgctcagtacaccatagagcggtatttcaccttagtcaccagatcgcagcaggagacaggaaattacactagattggtcttacagtttgagcttcggaggaatgtt

SEQ ID NO: 4887 - DNA, 1221 bp, Homo Sapiens
tcgccgtcgccgtcgccgtcgccctcccagaatgcaacccagactactacggactcatctaacaaaacagcaccgactccagcatccagtgtcaccatcatggctacagatacagcccagcagagcacagtccccacttccaaggccaacgaaatcttggcctcagtcaaggcgaccacccttggtgtatccagtgactcaccggggactacaaccctggctcagcaagtctcaggcccagtcaacactaccgtggctagaggaggcggctcaggcaaccctactaccaccatcgagagccccaagagcacaaaaagtgcagacaccactacagttgcaacctccacagccacagctaaacctaacaccacaagcagccagaatggagcagaagatacaacaaactctggggggaaaagcagccacagtgtgaccacagacctcacatccactaaggcagaacatctgacgacccctcaccctacaagtccacttagcccccgacaacccacttcgacgcatcctgtggccaccccaacaagctcgggacatgaccatcttatgaaaatttcaagcagttcaagcactgtggctatccctggctacaccttcacaagcccggggatgaccaccaccctaccgtcatcggttatctcgcaaagaactcaacagacctccagtcagatgccagccagctctacggccccttcctcccaggagacagtgcagcccacgagcccggcaacggcattgagaacacctaccctgccagagaccatgagctccagccccacagcagcatcaactacccaccgataccccaaaacaccttctcccactgtggctcatgagagtaactgggcaaagtgtgaggatcttgagacacagacacagagtgagaagcagctcgtcctgaacctcacaggaaacaccctctgtgcagggggcgcttcggatgagaaattgatctcactgatatgccgagcagtcaaagccaccttcaacccggcccaagataagtgcggcatacggctggcatctgttccaggaagtcagaccgtggtcgtcaaagaaatcactattcacactaagctccctgccaaggatgtgtacgagcggctgaaggacaaatgggatgaactaaaggaggcaggggtcagtgacatgaagctaggggaccaggggccaccggaggaggccgaggaccgcttcagcatgccc

SEQ ID NO: 4888 - DNA, 891 bp, Homo Sapiens
gcggacacatgtccagaggtgaaggtggtgggcctggagggctctgacaagctcaccattctccgaggctgcccggggctgcccggggccccagggccaaagggagaggcaggtgtcattggagagagaggagaacgcggtctccctggagcccctggaaaggcaggaccagtggggcccaaaggagaccgaggagagaaggggatgcgtggagagaaaggagacgctgggcagtctcagtcgtgtgcgacaggcccacgcaactgcaaggacctgctagaccgggggtatttcctgagcggctggcacaccatctacctgcccgactgccggcccctgactgtgctctgtgacatggacacggacggagggggctggaccgttttccagcggaggatggatggctctgtggacttctatcgggactgggccgcatacaagcagggcttcggcagtcagctgggggagttctggctggggaacgacaacatccacgccctgactgcccagggaagcagcgagctccgtgtagacctggtggactttgagggcaaccaccagtttgctaagtacaaatcattcaaggtggctgacgaggcagagaagtacaagctggtactgggagcctttgtcgggggcagtgcgggtaattctctaacgggccacaacaacaacttcttctccaccaaagaccaagacaatgatgtgagttcttcgaattgtgctgagaagttccagggagcctggtggtacgccgactgtcatgcttcaaacctcaatggtctctacctcatgggaccccatgagagctatgccaatggtatcaactggagtgcggcgaaggggtacaaatatagctacaaggtgtcagagatgaaggtgcggcccgcc

SEQ ID NO: 4889 - DNA, 1071 bp, Homo Sapiens
acctgccccgctgcctgccactgccccctggaggcgcccaagtgcgcgccgggagtcgggctggtccgggacggctgcggctgctgtaaggtctgcgccaagcagctcaacgaggactgcagcaaaacgcagccctgcgaccacaccaaggggctggaatgcaacttcggcgccagctccaccgctctgaaggggatctgcagagctcagtcagagggcagaccctgtgaatataactccagaatctaccaaaacggggaaagtttccagcccaactgtaaacatcagtgcacatgtattgatggcgccgtgggctgcattcctctgtgtccccaagaactatctctccccaacttgggctgtcccaaccctcggctggtcaaagttaccgggcagtgctgcgaggagtgggtctgtgacgaggatagtatcaaggaccccatggaggaccaggacggcctccttggcaaggagctgggattcgatgcctccgaggtggagttgacgagaaacaatgaattgattgcagttggaaaaggcagctcactgaagcggctccctgtttttggaatggagcctcgcatcctatacaaccctttacaaggccagaaatgtattgttcaaacaacttcatggtcccagtgctcaaagacctgtggaactggtatctccacacgagttaccaatgacaaccctgagtgccgccttgtgaaagaaacccggatttgtgaggtgcggccttgtggacagccagtgtacagcagcctgaaaaagggcaagaaatgcagcaagaccaagaaatcccccgaaccagtcaggtttacttacgctggatgtttgagtgtgaagaaataccggcccaagtactgcggttcctgcgtggacggccgatgctgcacgccccagctgaccaggactgtgaagatgcggttccgctgcgaagatggggagacattttccaagaacgtcatgatgatccagtcctgcaaatgcaactacaactgcccgcatgccaatgaagcagcgtttcccttctacaggctgttcaatgacattcacaaatttagggac

SEQ ID NO: 4890 - DNA, 1083 bp, Homo Sapiens
aatgagattctgggcctgaagttgcctggcgagccgccgctgacggccaacaccgtgtgcttgacgctgtccggcctgagcaagcggcagctaggcctgtgcctgcgcaaccccgacgtgacggcgtccgcgcttcagggtctgcacatcgcggtccacgagtgtcagcaccagctgcgcgaccagcgctggaactgctccgcgcttgagggcggcggccgcctgccgcaccacagcgccatcctcaagcgcggtttccgagaaagtgctttttccttctccatgctggctgctggggtcatgcacgcagtagccacggcctgcagcctgggcaagctggtgagctgtggctgtggctggaagggcagtggtgagcaggatcggctgagggccaaactgctgcagctgcaggcactgtcccgaggcaagagtttcccccactctctgcccagccctggccctggctcaagccccagccctggcccccaggacacatgggaatggggtggctgtaaccatgacatggactttggagagaagttctctcgggatttcttggattccagggaagctccccgggacatccaggcacgaatgcgaatccacaacaacagggtggggcgccaggtggtaactgaaaacctgaagcggaaatgcaagtgtcatggcacatcaggcagctgccagttcaagacatgctggagggcggccccagagttccgggcagtgggggcggcgttgagggagcggctgggccgggccatcttcattgatacccacaaccgcaattctggagccttccagccccgtctgcgtccccgtcgcctctcaggagagctggtctactttgagaagtctcctgacttctgtgagcgagaccccactatgggctccccagggacaaggggccgggcctgcaacaagaccagccgcctgttggatggctgtggcagcctgtgctgtggccgtgggcataacgtgctccggcagacacgagttgagcgctgccattgccgcttccactggtgctgctatgtgctgtgtgatgagtgcaaggttacagagtgggtgaatgtgtgtaag

SEQ ID NO: 4891 - DNA, 1599 bp, Homo Sapiens
caggactcagccagtcccatccggaccacacacacggggcaggtgctggggagtcttgtccatgtgaagggcgccaatgccggggtccaaaccttcctgggaattccatttgccaagccacctctaggtccgctgcgatttgcaccccctgagccccctgaatcttggagtggtgtgagggatggaaccacccatccggccatgtgtctacaggacctcaccgcagtggagtcagagtttcttagccagttcaacatgaccttcccttccgactccatgtctgaggactgcctgtacctcagcatctacacgccggcccatagccatgaaggctctaacctgccggtgatggtgtggatccacggtggtgcgcttgtttttggcatggcttccttgtatgatggttccatgctggctgccttggagaacgtggtggtggtcatcatccagtaccgcctgggtgtcctgggcttcttcagcactggagacaagcacgcaaccggcaactggggctacctggaccaagtggctgcactacgctgggtccagcagaatatcgcccactttggaggcaaccctgaccgtgtcaccatttttggcgagtctgcgggtggcacgagtgtgtcttcgcttgttgtgtcccccatatcccaaggactcttccacggagccatcatggagagtggcgtggccctcctgcccggcctcattgccagctcagctgatgtcatctccacggtggtggccaacctgtctgcctgtgaccaagttgactctgaggccctggtgggctgcctgcggggcaagagtaaagaggagattcttgcaattaacaagcctttcaagatgatccccggagtggtggatggggtcttcctgcccaggcacccccaggagctgctggcctctgccgactttaagcctgtccctagcattgttggtgtcaacaacaatgaattcggctggctcatccccaaggtcatgaggatctatgatacccagaaggaaatggacagagaggcctcccaggctgctctgcagaaaatgttaacgctgctgatgttgcctcctacatttggtgacctgctgagggaggagtacattggggacaatggggatccccagaccctccaagcgcagttccaggagatgatggcggactccatgtttgtgatccctgcactccaagtagcacattttcagtgttcccgggcccctgtgtacttctacgagttccagcatcagcccagctggctcaagaacatcaggccaccgcacatgaaggcagaccatggtgatgagcttccttttgttttcagaagtttctttgggggcaactacattaaattcactgaggaagaggagcagctaagcaggaagatgatgaagtactgggccaactttgcgagaaatgggaaccccaatggcgagggtctgccacactggccgctgttcgaccaggaggagcaatacctgcagctgaacctacagcctgcggtgggccgggctctgaaggcccacaggctccagttctggaagaaggcgctgccccaaaagatccaggagctcgaggagcctgaagagagacacacagagctg

SEQ ID NO: 4892 - DNA, 2886 bp, Homo Sapiens
gggggatacgagacatgccccacagtgcagccgaacatgctgaacgtgcacctgctgcctcacacacatgatgacgtgggctggctcaaaaccgtggaccagtacttttatggaatcaagaatgacatccagcacgccggtgtgcagtacatcctggactcggtcatctctgccttgctggcagatcccacccgtcgcttcatttacgtggagattgccttcttctcccgttggtggcaccagcagacaaatgccacacaggaagtcgtgcgagaccttgtgcgccaggggcgcctggagttcgccaatggtggctgggtgatgaacgatgaggcagccacccactacggtgccatcgtggaccagatgacacttgggctgcgctttctggaggacacatttggcaatgatgggcgaccccgtgtggcctggcacattgaccccttcggccactctcgggagcaggcctcgctgtttgcgcagatgggcttcgacggcttcttctttgggcgccttgattatcaagataagtgggtacggatgcagaagctggagatggagcaggtgtggcgggccagcaccagcctgaagcccccgaccgcggacctcttcactggtgtgcttcccaatggttacaacccgccaaggaatctgtgctgggatgtgctgtgtgtcgatcagccgctggtggaggaccctcgcagccccgagtacaacgccaaggagctggtcgattacttcctaaatgtggccactgcccagggccggtattaccgcaccaaccacactgtgatgaccatgggctcggacttccaatatgagaatgccaacatgtggttcaagaaccttgacaagctcatccggctggtaaatgcgcagcaggcaaaaggaagcagtgtccatgttctctactccacccccgcttgttacctctgggagctgaacaaggccaacctcacctggtcagtgaaacatgacgacttcttcccttacgcggatggcccccaccagttctggaccggttacttttccagtcggccggccctcaaacgctacgagcgcctcagctacaacttcctgcaggtgtgcaaccagctggaggcgctggtgggcctggcggccaacgtgggaccctatggctccggagacagtgcacccctcaatgaggcgatggctgtgctccagcatcacgacgccgtcagcggcacctcccgccagcacgtggccaacgactacgcgcgccagcttgcggcaggctgggggccttgcgaggttcttctgagcaacgcgctggcgcggctcagaggcttcaaagatcacttcaccttttgccaacagctaaacatcagcatctgcccgctcagccagacggcggcgcgcttccaggtcatcgtttataatcccctggggcggaaggtgaattggatggtacggctgccggtcagcgaaggcgttttcgttgtgaaggaccccaatggcaggacagtgcccagcgatgtggtaatatttcccagctcagacagccaggcgcaccctccggagctgctgttctcagcctcactgcccgccctgggcttcagcacctattcagtagcccaggtgcctcgctggaagccccaggcccgcgcaccacagcccatccccagaagatcctggtcccctgctttaaccatcgaaaatgagcacatccgggcaacgtttgatcctgacacagggctgttgatggagattatgaacatgaatcagcaactcctgctgcctgttcgccagaccttcttctggtacaacgccagtataggtgacaacgaaagtgaccaggcctcaggtgcctacatcttcagacccaaccaacagaaaccgctgcctgtgagccgctgggctcagatccacctggtgaagacacccttggtgcaggaggtgcaccagaacttctcagcttggtgttcccaggtggttcgcctgtacccaggacagcggcacctggagctagagtggtcggtggggccgatacctgtgggcgacacctgggggaaggaggtcatcagccgttttgacacaccgctggagacaaagggacgcttctacacagacagcaatggccgggagatcctggagaggaggcgggattatcgacccacctggaaactgaaccagacggagcccgtggcaggaaactactatccagtcaacacccggatttacatcacggatggaaacatgcagctgactgtgctgactgaccgctcccaggggggcagcagcctgagagatggctcgctggagctcatggtgcaccgaaggctgctgaaggacgatggacgcggagtatcggagccactaatggagaacgggtcgggggcgtgggtgcgagggcgccacctggtgctgctggacacagcccaggctgcagccgccggacaccggctcctggcggagcaggaggtcctggcccctcaggtggtgctggccccgggtggcggcgccgcctacaatctcggggctcctccgcgcacgcagttctcagggctgcgcagggacctgccgccctcggtgcacctgctcacgctggccagctggggccccgaaatggtgctgctgcgcttggagcaccagtttgccgtaggagaggattccggacgtaacctgagcgcccccgttaccttgaacttgagggacctgttctccaccttcaccatcacccgcctgcaggagaccacgctggtggccaaccagctccgcgaggcagcctccaggctcaagtggacaacaaacacaggccccacaccccaccaaactccgtaccagctggacccggccaacatcacgctggaacccatggaaatccgcactttcctggcctcagttcaatggaaggaggtggatggt

SEQ ID NO: 4893 - DNA, 954 bp, Homo Sapiens
ctgggcgcaagcatcatctgtaacaagatcccaggcctggctcccagacagcgggcgatctgccagagccggcccgacgccatcatcgtcataggagaaggctcacaaatgggcctggacgagtgtcagtttcagttccgcaatggccgctggaactgctctgcactgggagagcgcaccgtcttcgggaaggagctcaaagtggggagccgggaggctgcgttcacctacgccatcattgccgccggcgtggcccacgccatcacagctgcctgtacccagggcaacctgagcgactgtggctgcgacaaagagaagcaaggccagtaccaccgggacgagggctggaagtggggtggctgctctgccgacatccgctacggcatcggcttcgccaaggtctttgtggatgcccgggagatcaagcagaatgcccggactctcatgaacttgcacaacaacgaggcaggccgaaagatcctggaggagaacatgaagctggaatgtaagtgccacggcgtgtcaggctcgtgcaccaccaagacgtgctggaccacactgccacagtttcgggagctgggctacgtgctcaaggacaagtacaacgaggccgttcacgtggagcctgtgcgtgccagccgcaacaagcggcccaccttcctgaagatcaagaagccactgtcgtaccgcaagcccatggacacggacctggtgtacatcgagaagtcgcccaactactgcgaggaggacccggtgaccggcagtgtgggcacccagggccgcgcctgcaacaagacggctccccaggccagcggctgtgacctcatgtgctgtgggcgtggctacaacacccaccagtacgcccgcgtgtggcagtgcaactgtaagttccactggtgctgctatgtcaagtgcaacacgtgcagcgagcgcacggagatgtacacgtgcaag

SEQ ID NO: 4894 - DNA, 159 bp, Homo Sapiens
atgtggcgcgtgacggccttcatcggcagcaacattgtcacctcgcagaccatctgggagggcctatggatgaactgcgtggtgcagagcaccggccagatgcagtgcaaggtgtacgactcgctgctggcactgccgcaggacctgcaggcggcccgc

SEQ ID NO: 4895 - DNA, 2535 bp, Homo Sapiens
ttgctggtgatcatgtcacttggattaggcctggggcttggactcaggaaactggaaaagcaaggcagctgcaggaagaagtgctttgatgcatcatttagaggactggagaactgccggtgtgatgtggcatgtaaagaccgaggtgattgctgctgggattttgaagacacctgtgtggaatcaactcgaatatggatgtgcaataaatttcgttgtggagagaccagattagaggccagcctttgctcttgttcagatgactgtttgcagaggaaagattgctgtgctgactataagagtgtttgccaaggagaaacctcatggctggaagaaaactgtgacacagcccagcagtctcagtgcccagaagggtttgacctgccaccagttatcttgttttctatggatggatttagagctgaatatttatacacatgggatactttaatgccaaatatcaataaactgaaaacatgtggaattcattcaaaatacatgagagctatgtatcctaccaaaaccttcccaaatcattacaccattgtcacgggcttgtatccagagtcacatggcatcattgacaataatatgtatgatgtaaatctcaacaagaatttttcactttcttcaaaggaacaaaataatccagcctggtggcatgggcaaccaatgtggctgacagcaatgtatcaaggtttaaaagccgctacctacttttggcccggatcagaagtggctataaatggctcctttccttccatatacatgccttacaacggaagtgtcccatttgaagagaggatttctacactgttaaaatggctggacctgcccaaagctgaaagacccaggttttataccatgtattttgaagaacctgattcctctggacatgcaggtggaccagtcagtgccagagtaattaaagccttacaggtagtagatcatgcttttgggatgttgatggaaggcctgaagcagcggaatttgcacaactgtgtcaatatcatccttctggctgaccatggaatggaccagacttattgtaacaagatggaatacatgactgattattttcccagaataaacttcttctacatgtacgaagggcctgccccccgcatccgagctcataatatacctcatgacttttttagttttaattctgaggaaattgttagaaacctcagttgccgaaaacctgatcagcatttcaagccctatttgactcctgatttgccaaagcgactgcactatgccaagaacgtcagaatcgacaaagttcatctctttgtggatcaacagtggctggctgttaggagtaaatcaaatacaaattgtggaggaggcaaccatggttataacaatgagtttaggagcatggaggctatctttctggcacatggacccagttttaaagagaagactgaagttgaaccatttgaaaatattgaagtctataacctaatgtgtgatcttctacgcattcaaccagcaccaaacaatggaacccatggtagtttaaaccatcttctgaaggtgcctttttatgagccatcccatgcagaggaggtgtcaaagttttctgtttgtggctttgctaatccattgcccacagagtctcttgactgtttctgccctcacctacaaaatagtactcagctggaacaagtgaatcagatgctaaatctcacccaagaagaaataacagcaacagtgaaagtaaatttgccatttgggaggcctagggtactgcagaagaacgtggaccactgtctcctttaccacagggaatatgtcagtggatttggaaaagctatgaggatgcccatgtggagttcatacacagtcccccagttgggagacacatcgcctctgcctcccactgtcccagactgtctgcgggctgatgtcagggttcctccttctgagagccaaaaatgttccttctatttagcagacaagaatatcacccacggcttcctctatcctcctgccagcaatagaacatcagatagccaatatgatgctttaattactagcaatttggtacctatgtatgaagaattcagaaaaatgtgggactacttccacagtgttcttcttataaaacatgccacagaaagaaatggagtaaatgtggttagtggaccaatatttgattataattatgatggccattttgatgctccagatgaaattaccaaacatttagccaacactgatgttcccatcccaacacactactttgtggtgctgaccagttgtaaaaacaagagccacacaccggaaaactgccctgggtggctggatgtcctaccctttatcatccctcaccgacctaccaacgtggagagctgtcctgaaggtaaaccagaagctctttgggttgaagaaagatttacagctcacattgcccgggtccgtgatgtagaacttctcactgggcttgacttctatcaggataaagtgcagcctgtctctgaaattttgcaactaaagacatatttaccaacatttgaaaccactatt

SEQ ID NO: 4896 - DNA, 936 bp, Homo Sapiens
gtggagcccatcagcctgggactggccctggccggcgtcctcaccggctacatctacccgcgtctctactgcctcttcgccgagtgctgcgggcagaagcggagccttagccgggaggcactgcagaaggatctggacgacaacctctttggacagcatcttgcaaagaaaatcatcttaaatgccgtgtttggtttcataaacaacccaaagcccaagaaacctctcacgctctccctgcacgggtggacaggcaccggcaaaaatttcgtcagcaagatcatcgcagagaatatttacgagggtggtctgaacagtgactatgtccacctgtttgtggccacattgcactttccacatgcttcaaacatcaccttgtacaaggatcagttacagttgtggattcgaggcaacgtgagtgcctgtgcgaggtccatcttcatatttgatgaaatggataagatgcatgcaggcctcatagatgccatcaagcctttcctcgactattatgacctggtggatggggtctcctaccagaaagccatgttcatatttctcagcaatgctggagcagaaaggatcacagatgtggctttggatttctggaggagtggaaagcagagggaagacatcaagctcaaagacattgaacacgcgttgtctgtgtcggttttcaataacaagaacagtggcttctggcacagcagcttaattcaccggaacctcattgattattttgttcccttcctccccctggaatacaaacacctaaaaatgtgtatccgagtggaaatgcagtcccgaggctatgaaattgatgaagacattgtaagcagagtggctgaggagatgacatttttccccaaagaggagagagttttctcagataaaggctgcaaaacggtgttcaccaagttagattattactacgatgat

SEQ ID NO: 4897 - DNA, 936 bp, Homo Sapiens
ttcgagcccatcaccgtgggcctagccatcggggccgcgtcggccatcaccggctacctgtcctacaatgacatctactgccgcttcgccgagtgctgccgcgaggagcggccgctcaacgcttcggctctcaagctggatttggaggagaagctgtttggacagcatctagccacggaagtgattttcaaggcgctgactggcttcaggaacaacaaaaatcccaagaaaccactgaccctttccttacacggctgggctggcacaggcaagaattttgtcagtcaaattgtggctgaaaatcttcacccaaaaggtctgaagagtaactttgtccacctgtttgtatcgactctgcacttccctcatgagcagaagataaaactgtaccaggaccagttacagaagtggatccgcggtaatgtgagtgcatgtgcgaactctgttttcatatttgacgagatggataaattgcaccccgggatcattgacgcaatcaagccgtttctagactactacgagcaggttgacggagtgtcttaccgcaaagccatcttcatctttctcagcaatgcaggcggggaccttataactaagacggctcttgacttttggcgggccggaagaaagagggaagacattcagctgaaggacctggaacctgtactgtctgtcggagtcttcaataataaacacagtggcctgtggcacagtggactgatcgacaaaaacctcattgattactttatccccttcctgcctttggagtacagacatgtgaaaatgtgtgtgagggccgagatgagggcccgtggttctgccatagatgaagacattgtcacaagagtggcagaggaaatgacgtttttccccagagacgagaaaatctactcagacaagggctgcaagactgtgcagtcgcggctggatttccac

SEQ ID NO: 4898 - DNA, 189 bp, Homo Sapiens
gctaatgggttttttgaagaaataagacagggcaacattgagcgtgagtgcaaagaagaattctgtacatttgaagaagcaagagaagcttttgaaaataatgaaaaaactaaggagttttggagcacctacacaaaagcgcaacaaggggagagtaaccgaggaagtgactggtttcagttttacctt

SEQ ID NO: 4899 - DNA, 900 bp, Homo Sapiens
taccgggagaggcaggtggtgagccacctccaagacaagtatgtctttatcacgggctgtgactcgggctttgggaacctgctggccagacagctggatgcacgaggcttgagagtgctggctgcgtgtctgacggagaagggggccgagcagctgaggggccagacgtctgacaggctggagacggtgaccctggatgttaccaagatggagagcatcgctgcagctactcagtgggtgaaggagcatgtgggggacagaggactctggggactggtgaacaatgcaggcattcttacaccaattaccttatgtgagtggctgaacactgaggactctatgaatatgctcaaagtgaacctcattggtgtgatccaggtgaccttgagcatgcttcctttggtgaggagagcacggggaagaattgtcaatgtctccagcattctgggaagagttgctttctttgtaggaggctactgtgtctccaagtatggagtggaagccttttcagatattctgaggcgtgagattcaacattttggggtgaaaatcagcatagttgaacctggctacttcagaacgggaatgacaaacatgacacagtccttagagcgaatgaagcaaagttggaaagaagcccccaagcatattaaggagacctatggacagcagtattttgatgccctttacaatatcatgaaggaagggctgttgaattgtagcacaaacctgaacctggtcactgactgcatggaacatgctctgacatcggtgcatccgcgaactcgatattcagctggctgggatgctaaatttttcttcatccctctatcttatttacctacatcactggcagactacattttgactagatcttggcccaaaccagcccaggcagtc

SEQ ID NO: 4900 - DNA, 696 bp, Homo Sapiens
cagcagctccgcggcaccagagcgatgaatgacatcggcgactacgtgggctccaacctggagatctcctggctccccaacctggacgggctgatagccggctacgcccgcaacttccggcctggcatcggaggcccccccgtgaatgtggcccttgccctggaggtggccagcatcgaccacatctcagaggccaacatggagtacaccatgacggtgttcctgcaccagagctggcgggacagcaggctctcctacaaccacaccaacgagaccctgggcctggacagccgcttcgtggacaagctgtggctgcccgacaccttcatcgtgaacgccaagtcggcctggttccacgacgtgacggtggagaacaagctcatccggctgcagcccgacggcgtgatcctgtacagcatccgaatcacctccactgtggcctgcgacatggacctggccaaataccccatggacgagcaggagtgcatgctggacctggagagctacggttactcatcggaggacatcgtctactactggtcggagagccaggagcacatccacgggctggacaagctgcagctggcgcagttcaccatcaccagctaccgcttcaccacggagctgatgaacttcaagtccgctggccagttcccacggctcagcctgcacttccacctgcggaggaaccgcggc

SEQ ID NO: 4901 - DNA, 1104 bp, Homo Sapiens
ctgcatctgggggtaaccccctctgtgatccgtaagcgatacaacttgacctcacaagacgtgggctctggcaccagcaataacagccaagcctgtgcccagttcctggagcagtatttccatgactcagacctggctcagttcatgcgcctcttcggtggcaactttgcacatcaggcatcagtagcccgtgtggttggacaacagggccggggccgggccgggattgaggccagtctagatgtgcagtacctgatgagtgctggtgccaacatctccacctgggtctacagtagccctggccggcatgagggacaggagcccttcctgcagtggctcatgctgctcagtaatgagtcagccctgccacatgtgcatactgtgagctatggagatgatgaggactccctcagcagcgcctacatccagcgggtcaacactgagctcatgaaggctgccgctcggggtctcaccctgctcttcgcctcaggtgacagtggggccgggtgttggtctgtctctggaagacacgagttccgccctaccttccctgcctccagcccctatgtcaccacagtgggaggcacatccttccaggaacctttcctcatcacaaatgaaattgttgactatatcagtggtggtggcttcagcaatgtgttcccacggccttcataccaggaggaagctgtaacgaagttcctgagctctagcccccacctgccaccatccagttacttcaatgccagtggccgtgcctacccagatgtggctgcactttctgatggctactgggtggtcagcaacagagtgcccattccatgggtgtccggaacctcggcctctactccagtgtttggggggatcctatccttgatcaatgagcacaggatccttagtggccgcccccctcttggctttctcaacccaaggctctaccagcagcatggggcaggactctttgatgtaacccgtggctgccatgagtcctgtctggatgaagaggtagagggccagggtttctgctctggtcctggctgggatcctgtaacaggctggggaacacccaacttcccagctttgctgaagactctactcaacccc

SEQ ID NO: 4902 - DNA, 1113 bp, Homo Sapiens
gaggaagctggagcgagggtgcaacaaaacgttccaagtgggacagatactggagatcctcaaagtaagcccctcggtgactgggctgctggcaccatggacccagagagcagtatctttattgaggatgccattaagtatttcaaggaaaaagtgagcacacagaatctgctactcctgctgactgataatgaggcctggaacggattcgtggctgctgctgaactgcccaggaatgaggcagatgagctccgtaaagctctggacaaccttgcaagacaaatgatcatgaaagacaaaaactggcacgataaaggccagcagtacagaaactggtttctgaaagagtttcctcggttgaaaagtgagcttgaggataacataagaaggctccgtgcccttgcagatggggttcagaaggtccacaaaggcaccaccatcgccaatgtggtgtctggctctctcagcatttcctctggcatcctgaccctcgtcggcatgggtctggcacccttcacagagggaggcagccttgtactcttggaacctgggatggagttgggaatcacagccgctttgaccgggattaccagcagtaccatggactacggaaagaagtggtggacacaagcccaagcccacgacctggtcatcaaaagccttgacaaattgaaggaggtgagggagtttttgggtgagaacatatccaactttctttccttagctggcaatacttaccaactcacacgaggcattgggaaggacatccgtgccctcagacgagccagagccaatcttcagtcagtaccgcatgcctcagcctcacgcccccgggtcactgagccaatctcagctgaaagcggtgaacaggtggagagggttaatgaacccagcatcctggaaatgagcagaggagtcaagctcacggatgtggcccctgtaagcttctttcttgtgctggatgtagtctacctcgtgtacgaatcaaagcacttacatgagggggcaaagtcagagacagctgaggagctgaagaaggtggctcaggagctggaggagaagctaaacattctcaacaataattataagattctgcaggcggaccaagaactg

SEQ ID NO: 4903 - DNA, 861 bp, Homo Sapiens
cgcaccgccgagctaggccagcaggagcttctgcggaaagcggggaccctccaggatgacgtccgcgatggcgtggccccaaacggctctgcccagcagttgccgcagaccatcatcatcggcgtgcgcaagggcggcacgcgcgcactgctggagatgctcagcctgcaccccgacgtggcggccgcggagaacgaggtccacttcttcgactgggaggagcattacagccacggcttgggctggtacctcagccagatgcccttctcctggccacaccagctcacagtggagaagacccccgcgtatttcacgtcgcccaaagtgcctgagcgagtctacagcatgaacccgtccatccggctgctgctcatcctgcgagacccgtcggagcgcgtgctatctgactacacccaagtgttctacaaccacatgcagaagcacaagccctacccgtccatcgaggagttcctggtgcgcgatggcaggctcaatgtggactacaaggccctcaaccgcagcctctaccacgtgcacatgcagaactggctgcgctttttcccgctgcgccacatccacattgtggacggcgaccgcctcatcagggaccccttccctgagatccaaaaggtcgagaggttcctaaagctgtcgccgcagatcaatgcttcgaacttctactttaacaaaaccaagggcttttactgcctgcgggacagcggccgggaccgctgcttacatgagtccaaaggccgggcgcacccccaagtcgatcccaaactactcaataaactgcacgaatattttcatgagccaaataagaagttcttcgagcttgttggcagaacatttgactggcac

SEQ ID NO: 4904 - DNA, 1008 bp, Homo Sapiens
tacttcgggctgacgggcagcgagcccctgaccatcctcccgctgaccctggagccagaggcggccgcccaggcgcactacaaggcctgcgaccggctgaagctggagcggaagcagcggcgcatgtgccgccgggacccgggcgtggcagagacgctggtggaggccgtgagcatgagtgcgctcgagtgccagttccagttccgctttgagcgctggaactgcacgctggagggccgctaccgggccagcctgctcaagcgaggcttcaaggagactgccttcctctatgccatctcctcggctggcctgacgcacgcactggccaaggcgtgcagcgcgggccgcatggagcgctgtacctgcgatgaggcacccgacctggagaaccgtgaggcctggcagtgggggggctgcggagacaaccttaagtacagcagcaagttcgtcaaggaattcctgggcagacggtcaagcaaggatctgcgagcccgtgtggacttccacaacaacctcgtgggtgtgaaggtgatcaaggctggggtggagaccacctgcaagtgccacggcgtgtcaggctcatgcacggtgcggacctgctggcggcagttggcgcctttccatgaggtgggcaagcatctgaagcacaagtatgagacggcactcaaggtgggcagcaccaccaatgaagctgccggcgaggcgggtgccatctccccaccacggggccgtgcctcgggggcaggtggcagcgacccgctgccccgcactccagagctggtgcacctggatgactcgcctagcttctgcctggctggccgcttctccccgggcaccgctggccgtaggtgccaccgtgagaagaactgcgagagcatctgctgtggccgcggccataacacacagagccgggtggtgacaaggccctgccagtgccaggtgcgttggtgctgctatgtggagtgcaggcagtgcacgcagcgtgaggaggtctacacctgcaagggc

SEQ ID NO: 4905 - DNA, 1140 bp, Homo Sapiens
gaagaggggcttaatttccccacatatgatgggaaggaccgagtggtaagtctttccgagaagaacttcaagcaggttttaaagaaatatgacttgctttgcctctactaccatgagccggtgtcttcagataaggtcacgcaaaaacagttccaactgaaagaaatcgtgcttgagcttgtggcccaggtccttgaacataaagctataggctttgtgatggtggatgccaagaaagaagccaagcttgccaagaaactgggttttgatgaagaaggaagcctgtatattcttaagggtgatcgcacaatagagtttgatggcgagtttgcagctgatgtcttggtggagttcctcttggatctaattgaagacccagtggagatcatcagcagcaaactggaagtccaagccttcgaacgcattgaagactacatcaaactcattggctttttcaagagtgaggactcagaatactacaaggcttttgaagaagcagctgaacacttccagccttacatcaaattctttgccacctttgacaaaggggttgcaaagaaattatctttgaagatgaatgaggttgacttctatgagccatttatggatgagcccattgccatccccaacaaaccttacacagaagaggagctggtggagtttgtgaaggaacaccaaagacccactctacgtcgcctgcgcccagaagaaatgtttgaaacatgggaagatgatttgaatgggatccacattgtggcctttgcagagaagagtgatccagatggctacgaattcctggagatcctgaaacaggttgcccgggacaatactgacaaccccgatctgagcatcctgtggatcgacccggacgactttcctctgctcgttgcctactgggagaagactttcaagattgacctattcaggccacagattggggtggtgaatgtcacagatgctgacagtgtctggatggagattccagatgatgacgatcttccaactgctgaggagctggaggactggattgaggatgtgctttctggaaagataaacactgaagatgatgatgaagatgatgatgatgatgataattctgatgaagaggataatgatgacagtgatgatgatgatgatgaa

SEQ ID NO: 4906 - DNA, 399 bp, Homo Sapiens
gggccatgggctaatatatgtgctggcaagtcttccaatgagatccggacgtgtgaccgccatggctgtggacagtactctgctcaaagaagtcagaggcctcaccagggtgtggacgtcttgtgctctgctggatctactgtgtacgcaccattcactggaatgattgtgggccaggagaaaccttatcaaaacaagaatgctatcaataatggtgttcgaatatctggaagaggtttttgtgtcaaaatgttctacattaagccaattaagtataaaggtcctattaagaagggagaaaaacttggaactctattgcccttgcagaaagtttatcctggcatacaatcgcatgtgcacattgaaaactgtgactcgagtgaccctactgcatacctg

SEQ ID NO: 4907 - DNA, 213 bp, Homo Sapiens
cgccacggcggccggacggtggagaacatgagcatcatcggctggttcgtgcgaagcttcaagtacttttacgggctccgcttcgaggtgcgggacccgcgcaggctgcaggaggcccgtccctgtgtcatcgtctccaaccaccagagcatcctggacatgatgggcctcatggaggtccttccggagcgctgcgtgcagatcgccaagcgg

SEQ ID NO: 4908 - DNA, 321 bp, Homo Sapiens
ggtttcacacctgaccaccactgccagagtcctggggtggctgagctgagccagcgctgtggctggagccctgcggaggagctgaactatacagtgccaggcctggggcccgcgggcgaggccttccttggccagtgcaggcgctatgaagtggactggaaccagagcgccctcagctgtgtagaccccctggctagcctggccaccaacaggagccacctgccgctgggtccctgccaggatggctgggtgtatgacacgcccggctcttccatcgtcactgagttcaacctggtgtgtgctgactcctggaagctggac

SEQ ID NO: 4909 - DNA, 627 bp, Homo Sapiens
ccaggggtggaaggcgtgacacactacaaggccggcgaccctgttattctgtatgtcaacaaagtgggaccctaccataaccctcaggaaacttaccactactatcagcttccagtctgctgccctgagaagatacgtcacaaaagccttagcctgggtgaagtgctggatggggaccgaatggctgagtctttgtatgagatccgctttcgggaaaacgtggagaagagaattctgtgccacatgcagctcagttctgcacaggtggagcagctgcgccaggccattgaagaactgtactactttgaatttgtggtagatgacttgccaatccggggctttgtgggctacatggaggagagtggtttcctgccacacagccacaagataggactctggacccatttggacttccacctagaattccatggagaccgaattatatttgccaatgtttcagtgcgggacgtcaagccccacagcttggatgggttacgacctgacgagttcctaggccttacccacacttatagcgtgcgctggtctgagacttcagtggagcgtcggagtgacaggcgccgtggtgacgatggtggtttctttcctcgaacactggaaatccattgg

SEQ ID NO: 4910 - DNA, 1161 bp, Homo Sapiens
tggaagttcatgggcagcaagtgctccaactctgggatagagtgcgactcctcaggtacctgcatcaacccctctaactggtgtgatggcgtgtcacactgccccggcggggaggacgagaatcggtgtgttcgcctctacggaccaaacttcatccttcaggtgtactcatctcagaggaagtcctggcaccctgtgtgccaagacgactggaacgagaactacgggcgggcggcctgcagggacatgggctataagaataatttttactctagccaaggaatagtggatgacagcggatccaccagctttatgaaactgaacacaagtgccggcaatgtcgatatctataaaaaactgtaccacagtgatgcctgttcttcaaaagcagtggtttctttacgctgtatagcctgcggggtcaacttgaactcaagccgccagagcaggatcgtgggcggcgagagcgcgctcccgggggcctggccctggcaggtcagcctgcacgtccagaacgtccacgtgtgcggaggctccatcatcacccccgagtggatcgtgacagccgcccactgcgtggaaaaacctcttaacaatccatggcattggacggcatttgcggggattttgagacaatctttcatgttctatggagccggataccaagtagaaaaagtgatttctcatccaaattatgactccaagaccaagaacaatgacattgcgctgatgaagctgcagaagcctctgactttcaacgacctagtgaaaccagtgtgtctgcccaacccaggcatgatgctgcagccagaacagctctgctggatttccgggtggggggccaccgaggagaaagggaagacctcagaagtgctgaacgctgccaaggtgcttctcattgagacacagagatgcaacagcagatatgtctatgacaacctgatcacaccagccatgatctgtgccggcttcctgcaggggaacgtcgattcttgccagggtgacagtggagggcctctggtcacttcgaagaacaatatctggtggctgataggggatacaagctggggttctggctgtgccaaagcttacagaccaggagtgtacgggaatgtgatggtattcacggactggatttatcgacaaatgagggcagacggc

SEQ ID NO: 4911 - DNA, 183 bp, Homo Sapiens
atggatcattcccaccatatggggatgagctatatggactccaacagtaccatgcaaccttctcaccatcacccaaccacttcagcctcacactcccatggtggaggagacagcagcatgatgatgatgcctatgaccttctactttggctttaagaatgtggaactactgttttccggtttg

SEQ ID NO: 4912 - DNA, 1536 bp, Homo Sapiens
gaattcttcacctctattgggcacatgactgacctgatttatgcagagaaagagctggtgcagtctctgaaagagtacatccttgtggaggaagccaagctttccaagattaagagctgggccaacaaaatggaagccttgactagcaagtcagctgctgatgctgagggctacctggctcaccctgtgaatgcctacaaactggtgaagcggctaaacacagactggcctgcgctggaggaccttgtcctgcaggactcagctgcaggttttatcgccaacctctctgtgcagcggcagttcttccccactgatgaggacgagataggagctgccaaagccctgatgagacttcaggacacatacaggctggacccaggcacaatttccagaggggaacttccaggaaccaagtaccaggcaatgctgagtgtggatgactgctttgggatgggccgctcggcctacaatgaaggggactattatcatacggtgttgtggatggagcaggtgctaaagcagcttgatgccggggaggaggccaccacaaccaagtcacaggtgctggactacctcagctatgctgtcttccagttgggtgatctgcaccgtgccctggagctcacccgccgcctgctctcccttgacccaagccacgaacgagctggagggaatctgcggtactttgagcagttattggaggaagagagagaaaaaacgttaacaaatcagacagaagctgagctagcaaccccagaaggcatctatgagaggcctgtggactacctgcctgagagggatgtttacgagagcctctgtcgtggggagggtgtcaaactgacaccccgtagacagaagaggcttttctgtaggtaccaccatggcaacagggccccacagctgctcattgcccccttcaaagaggaggacgagtgggacagcccgcacatcgtcaggtactacgatgtcatgtctgatgaggaaatcgagaggatcaaggagatcgcaaaacctaaacttgcacgagccaccgttcgtgatcccaagacaggagtcctcactgtcgccagctaccgggtttccaaaagctcctggctagaggaagatgatgaccctgttgtggcccgagtaaatcgtcggatgcagcatatcacagggttaacagtaaagactgcagaattgttacaggttgcaaattatggagtgggaggacagtatgaaccgcacttcgacttctctaggcgaccttttgacagcggcctcaaaacagaggggaataggttagcgacgtttcttaactacatgagtgatgtagaagctggtggtgccaccgtcttccctgatctgggggctgcaatttggcctaagaagggtacagctgtgttctggtacaacctcttgcggagcggggaaggtgactaccgaacaagacatgctgcctgccctgtgcttgtgggctgcaagtgggtctccaataagtggttccatgaacgaggacaggagttcttgagaccttgtggatcaacagaagttgac

SEQ ID NO: 4913 - DNA, 369 bp, Homo Sapiens
gggatcctggaactggcaggaactgtgggttgtgttggtccccgaacccccatcgcctatatgaaatatggttgcttttgtggcttgggaggccatggccagccccgcgatgccattgactggtgctgccatggccacgactgttgttacactcgagctgaggaggccggctgcagccccaagacagagcgctactcctggcagtgcgtcaatcagagcgtcctgtgcggaccggcagagaacaaatgccaagaactgttgtgcaagtgtgaccaggagattgctaactgcttagcccaaactgagtacaacttaaagtacctcttctacccccagttcctatgtgagccggactcgcccaagtgtgac

SEQ ID NO: 4914 - DNA, 603 bp, Homo Sapiens
tctaccgaggatgaaggcgaggacccctggtaccaaaaagcatgcaagtgcgattgccaaggaggacccaatgctctgtggtctgcaggtgccacctccttggactgtataccagaatgcccatatcacaagcctctgggtttcgagtcaggggaggtcacaccggaccagatcacctgctctaacccggagcagtatgtgggctggtattcttcgtggactgcaaacaaggcccggctcaacagtcaaggctttgggtgtgcctggctctccaagttccaggacagtagccagtggttacagatagatctgaaggagatcaaagtgatttcagggatcctcacccaggggcgctgtgacatcgatgagtggatgaccaagtacagcgtgcagtacaggaccgatgagcgcctgaactggatttactacaaggaccagactggaaacaaccgggtcttctatggcaactcggaccgcacctccacggttcagaacctgctgcggccccccatcatctcccgcttcatccgcctcatcccgctgggctggcacgtccgcattgccatccggatggagctgctggagtgcgtcagcaagtgtgcc

SEQ ID NO: 4915 - DNA, 819 bp, Homo Sapiens
aaaaaaggctaccaggagcgggacctggaaccccagttttccatcatcaccaaactcaaaggggtttccgtcactcagatcaaggagcttggaaaccggctgtgggatgtggccgacttcgtgaagccacctcagggagagaacgtgttcttcttggtgaccaacttccttgtgacgccagcccaagttcagggcagatgcccagagcacccgtccgtcccactggctaactgctgggtcgacgaggactgccccgaaggggagggaggcacacacagccacggtgtaaaaacaggccagtgtgtggtgttcaatgggacccacaggacctgtgagatctggagttggtgccccgtggagagtggcgttgtgccctcgaggcccctgctggcccaggcccagaacttcacactgttcatcaaaaacacagtcaccttcagcaagttcaacttctctaagtccaatgccttggagacctgggaccccacctattttaagcactgccgctatgaaccacaattcagcccctactgtcccgtgttccgcattggggacctcgtggccaaggctggagggaccttcgaggacctggcgttgctgggtggctctgtaggcatcagagttcactgggattgtgacctggacaccggggactctggctgctggcctcactactccttccagctgcaggagaagagctacaacttcaggacagccactcactggtgggagcaaccgggtgtggaggcccgcaccctgctcaagctctatggaatccgcttcgacatcctcgtcaccgggcaggcagggaagttcggg

SEQ ID NO: 4916 - DNA, 153 bp, Homo Sapiens
cgcgtgtcggccttcatcggcagcaacatcatcacgtcgcagaacatctgggagggcctgtggatgaactgcgtggtgcagagcaccggccagatgcagtgcaaggtgtacgactcgctgctggcactgccacaggaccttcaggcggcccgc

SEQ ID NO: 4917 - DNA, 738 bp, Homo Sapiens
gcagaggcggcgctgctcccccaaaacgacacgcgcttggaccccgaagcctatggcgccccgtgcgcgcgcggctcgcagccctggcaggtctcgctcttcaacggcctctcgttccactgcgcgggtgtcctggtggaccagagttgggtgctgacggccgcgcactgcggaaacaagccactgtgggctcgagtaggggatgaccacctgctgcttcttcagggcgagcagctccgccggacgactcgctctgttgtccatcccaagtaccaccagggctcaggccccatcctgccaaggcgaacggatgagcacgatctcatgttgctaaagctggccaggcccgtagtgccggggccccgcgtccgggccctgcagcttccctaccgctgtgctcagcccggagaccagtgccaggttgctggctggggcaccacggccgcccggagagtgaagtacaacaagggcctgacctgctccagcatcactatcctgagccctaaagagtgtgaggtcttctaccctggcgtggtcaccaacaacatgatatgtgctggactggaccggggccaggacccttgccagagtgactctggaggccccctggtctgtgacgagaccctccaaggcatcctctcgtggggtgtttacccctgtggctctgcccagcatccagctgtctacacccagatctgcaaatacatgtcctggatcaataaagtcatacgctccaac

SEQ ID NO: 4918 - DNA, 1506 bp, Homo Sapiens
ctacccccaccctgtgagagtgagatttactgccacggggagctcctaaaccaagttcaaatggccaagctctaccaggatgacaagcagtttgtggacatgccactgtctatagctccagaacaagtcctgcagaccttcactgagctgtccagggaccacaatcacagcatccccagggagcagctgcaggcgtttgtccacgaacacttccaggccaaggggcaggagctgcagccctggacccctgcagactggaaagacagcccccagttcctgcagaagatttcagatgccaaactgcgtgcctgggcagggcagctgcatcagctctggaagaagctggggaagaagatgaagccagaggttctcagccaccctgagcggttctctctcatctactcagaacatcccttcattgtgcctggcggtcgctttgttgagttctactactgctatgggcatgtccccaatggtgggcgcgtgtactacctgcagcggagccagcccccactcttgaccctcatgatggattgctacttgactcacaccaatgacaccgcctttctacaggaaaacattgaaacactagccttggaattggacttttggaccaagaacaggactgtctctgtgagcttggagggaaagaactacctcctgaatcgctattatgtcccttatgggggacccaggcctgagtcctacagcaaagatgtggagttggctgacaccttgccagaaggagaccgggaggctctgtgggctgagctcaaggctggggctgagtctggctgggacttctcttcacgctggctcattggaggcccaaaccccaactcgcttagcggcatccgaacaagcaaactggtgcctgttgacctgaatgccttcctatgccaagcagaggagctgatgagcaacttctattccaggctggggaacgactcccaggccacgaagtacagaatcctgcggtcgcagcgcttggccgccctgaacacagtcctgtgggatgagcagaccggagcctggttcgattacgaccttgagaagaagaagaaaaaccgggagttttacccatccaacctcactccactctgggccgggtgtttctctgaccctggcgtggcggacaaggctctgaaatacctggaggacaaccggatcctgacttaccagtatgggatcccgacctctctccagaagacaggccagcagtgggatttccccaatgcctgggcccccctgcaggacctggtcatcagaggcctggccaaggcacctttacgtcgggcccaggaagtggctttccagctggctcagaattggatccgaaccaattttgatgtctactcgcagaagtcagccatgtatgagaagtatgacgtcagcaacggtggacagcccggtgggggaggagaatatgaagttcaggagggatttggctggacgaatggcgtggtcctgatgctgctggaccgctatggtgaccggctgacctca

SEQ ID NO: 4919 - DNA, 510 bp, Homo Sapiens
gccgaccgagaacgcagcatccacgacttctgcctggtgtcgaaggtggtgggcagatgccgggcctccatgcctaggtggtggtacaatgtcactgacggatcctgccagctgtttgtgtatgggggctgtgacggaaacagcaataattacctgaccaaggaggagtgcctcaagaaatgtgccactgtcacagagaatgccacgggtgacctggccaccagcaggaatgcagcggattcctctgtcccaagtgctcccagaaggcaggattctgaagaccactccagcgatatgttcaactatgaagaatactgcaccgccaacgcagtcactgggccttgccgtgcatccttcccacgctggtactttgacgtggagaggaactcctgcaataacttcatctatggaggctgccggggcaataagaacagctaccgctctgaggaggcctgcatgctccgctgcttccgccagcaggagaatcctcccctgccccttggctcaaag

SEQ ID NO: 4920 - DNA, 528 bp, Homo Sapiens
tgcgggccgggccgggggccggttggccggcgccgctatgcgcgcaagcagctcgtgccgctactctacaagcaatttgtgcccggcgtgccagagcggaccctgggcgccagtgggccagcggaggggagggtggcaaggggctccgagcgcttccgggacctcgtgcccaactacaaccccgacatcatcttcaaggatgaggagaacagtggagccgaccgcctgatgaccgagcgttgtaaggagcgggtgaacgctttggccattgccgtgatgaacatgtggcccggagtgcgcctacgagtgactgagggctgggacgaggacggccaccacgctcaggattcactccactacgaaggccgtgctttggacatcactacgtctgaccgcgaccgcaacaagtatgggttgctggcgcgcctcgcagtggaagccggcttcgactgggtctactacgagtcccgcaaccacgtccacgtgtcggtcaaagctgataactcactggcggtccgggcgggcggc

SEQ ID NO: 4921 - DNA, 1080 bp, Homo Sapiens
gccaccgaaagcgtcaagcaagaagatgctggagtacggccttctgcaggaaacgtctccacccaccccagcttgagccaacggcctggaggctctaccaagtcgcatccggagccgcagactccaaaagacagccctagcaagtcgagtgcggaggcgcagaccccagaagacacccccaacaagtcgggtgcggaggcaaagacccaaaaagacagctccaacaagtcgggtgcggaggcaaagacccaaaaaggcagcactagcaagtcgggttcggaggcgcagaccacaaaagacagcactagtaagtcgcatccggagctgcagactccaaaagacagcactggcaaatcgggtgcggaggcgcagaccccagaagacagccccaacaggtcgggtgcggaggcaaagacccaaaaagacagccctagcaagtcaggttcggaggcgcagaccacaaaagatgtccctaataagtcgggtgcggacggccagaccccaaaagacggctccagcaagtcgggtgcggaggatcagaccccaaaagacgtccctaacaagtcgggtgcggagaagcagactccaaaagacggctctaacaagtccggtgcagaggagcagggcccaatagacgggcccagcaagtcgggtgcggaggagcagacctcaaaagacagccctaacaaggtggttccagagcagccttcccggaaagaccattccaagcccatctccaacccttctgataacaaggagctccccaaggctgacacaaaccagcttgctgacaaagggaagctttctcctcatgctttcaaaaccgaatctggggaggaaactgacctcatttctcccccgcaggaggaagttaagtcttcagagcctactgaggatgtggagcccaaagaggctgaagatgatgatacaggacccgaggagggctcaccgcccaaagaagagaaagaaaagatgtccggttctgcctccagtgagaaccgtgaagggacactttcggattccacgggtagcgagaaggatgacctttatccgaacggttctggaaatggcagcgcggag

SEQ ID NO: 4922 - DNA, 291 bp, Homo Sapiens
cagcactggtcccatggctggtaccctggaggaaagcgagccctcagctcagcccaggatccccagaatgcccttaggcccccaggaagggccctggacactgcagcaggcagcccagtccagactgcccatggcctcccaagtgatgccctggctcccctggacgacagcatgccctgggagggcaggaccacggcccagtggtcccttcacaggaagcgacacctggcacggacactgctgaccgcagcccgagagccccgccccgccccgccatcctccaataaagtg

SEQ ID NO: 4923 - DNA, 951 bp, Homo Sapiens
atgcaattgccccggtggtgggagctgggagacccctgtgcttggacgggacagggtcgggggacacgcaggatgagccccgcgaccactggcacattcttgctgacagtgtacagtattttctccaaggtacactccgatcggagtgtatacccatcagcaggtgtcctctttgttcatgttttggaaagagaatattttaagggggaatttccaccttacccaaaacctggcgagattagtaatgatcccataacatttaatacaaatttaatgggttacccagaccgacctggatggcttcgatatatccaaaggacaccatatagtgatggagtcctatatgggtccccaacagctgaaaatgtggggaagccaacaatcattgagataactgcctacaacaggcgcacctttgagactgcaaggcataatttgataattaatataatgtctgcagaagacttcccgttgccatatcaagcagaattcttcattaagaatatgaatgtagaagaaatgttggccagtgaggttcttggagactttcttggcgcagtgaaaaatgtgtggcagccagagcgcctgaacgccataaacatcacatcggccctagacaggggtggcagggtgccacttcccattaatgacctgaaggagggcgtttatgtcatggttggtgcagatgtcccgttttcttcttgtttacgagaagttgaaaatccacagaatcaattgagatgtagtcaagaaatggagcctgtaataacatgtgataaaaaatttcgtactcaattttacattgactggtgcaaaatttcattggttgataaaacaaagcaagtgtccacctatcaggaagtgattcgtggagaggggattttacctgatggtggagaatacaaacccccttctgattctttgaaaagcagagactattacacggatttc

SEQ ID NO: 4924 - DNA, 831 bp, Homo Sapiens
gccccagtgaacggttccaagtggacttattttggtcctgatggggagaatagctggtccaagaagtacccgtcgtgtgggggcctgctgcagtcccccatagacctgcacagtgacatcctccagtatgacgccagcctcacgcccctcgagttccaaggctacaatctgtctgccaacaagcagtttctcctgaccaacaatggccattcagtgaagctgaacctgccctcggacatgcacatccagggcctccagtctcgctacagtgccacgcagctgcacctgcactgggggaacccgaatgacccgcacggctctgagcacaccgtcagcggacagcacttcgccgccgagctgcacattgtccattataactcagacctttatcctgacgccagcactgccagcaacaagtcagaaggcctcgctgtcctggctgttctcattgagatgggctccttcaatccgtcctatgacaagatcttcagtcaccttcaacatgtaaagtacaaaggccaggaagcattcgtcccgggattcaacattgaagagctgcttccggagaggaccgctgaatattaccgctaccgggggtccctgaccacacccccttgcaaccccactgtgctctggacagttttccgaaaccccgtgcaaatttcccaggagcagctgctggctttggagacagccctgtactgcacacacatggacgacccttcccccagagaaatgatcaacaacttccggcaggtccagaagttcgatgagaggctggtatacacctccttctcccaagtgcaagtctgtactgcggcaggactgagt

SEQ ID NO: 4925 - DNA, 162 bp, Homo Sapiens
atgtccggcaccaaattggaggactcccccccttgtcgcaactggtcatctgcttcggagctgaatgaaactcaagagccctttttaaaccccaccgactatgacgacgaggaattcctgcggtacctgtggagggaatacctgcacccgaaagaatatgag

SEQ ID NO: 4926 - DNA, 594 bp, Homo Sapiens
tacatttcgcagaatgacatgatcgccattcttgattatcataatcaagttcggggcaaagtgttcccaccggcagcaaatatggaatatatggtttgggatgaaaatcttgcaaaatcggcagaggcttgggcggctacttgcatttgggaccatggaccttcttacttactgagatttttgggccaaaatctatctgtacgcactggaagatatcgctctattctccagttggtcaagccatggtatgatgaagtgaaagattatgcttttccatatccccaggattgcaaccccagatgtcctatgagatgttttggtcccatgtgcacacattatacgcagatggtttgggccacttccaatcggataggatgcgcaattcatacttgccaaaacatgaatgtttggggatctgtgtggcgacgtgcagtttacttggtatgcaactatgccccaaagggcaattggattggagaagcaccatataaagtaggggtaccatgttcatcttgtcctccaagttatgggggatcttgtactgacaatctgtgttttccaggagttacgtcaaactacctgtactggtttaaa

SEQ ID NO: 4927 - DNA, 888 bp, Homo Sapiens
aaacccacagaaaagaaggaccgtgtacatcatgagcctcagctcagtgacaaggttcacaatgatgctcagagttttgattatgaccatgatgccttcttgggtgctgaagaagcaaagacctttgatcagctgacaccagaagagagcaaggaaaggcttggaaagattgtaagtaaaatagatggcgacaaggacgggtttgtcactgtggatgagctcaaagactggattaaatttgcacaaaagcgctggatttacgaggatgtagagcgacagtggaaggggcatgacctcaatgaggacggcctcgtttcctgggaggagtataaaaatgccacctacggctacgttttagatgatccagatcctgatgatggatttaactataaacagatgatggttagagatgagcggaggtttaaaatggcagacaaggatggagacctcattgccaccaaggaggagttcacagctttcctgcaccctgaggagtatgactacatgaaagatatagtagtacaggaaacaatggaagatatagataagaatgctgatggtttcattgatctagaagagtatattggtgacatgtacagccatgatgggaatactgatgagccagaatgggtaaagacagagcgagagcagtttgttgagtttcgggataagaaccgtgatgggaagatggacaaggaagagaccaaagactggatccttccctcagactatgatcatgcagaggcagaagccaggcacctggtctatgaatcagaccaaaacaaggatggcaagcttaccaaggaggagatcgttgacaagtatgacttatttgttggcagccaggccacagattttggggaggccttagtacggcatgatgagttc

SEQ ID NO: 4928 - DNA, 984 bp, Homo Sapiens
tctccatctggagtgcggctggtggggggcctccaccgctgtgaagggcgggtggaggtggaacagaaaggccagtggggcaccgtgtgtgatgacggctgggacattaaggacgtggctgtgttgtgccgggagctgggctgtggagctgccagcggaacccctagtggtattttgtatgagccaccagcagaaaaagagcaaaaggtcctcatccaatcagtcagttgcacaggaacagaagatacattggctcagtgtgagcaagaagaagtttatgattgttcacatgatgaagatgctggggcatcgtgtgagaacccagagagctctttctccccagtcccagagggtgtcaggctggctgacggccctgggcattgcaagggacgcgtggaagtgaagcaccagaaccagtggtataccgtgtgccagacaggctggagcctccgggccgcaaaggtggtgtgccggcagctgggatgtgggagggctgtactgactcaaaaacgctgcaacaagcatgcctatggccgaaaacccatctggctgagccagatgtcatgctcaggacgagaagcaacccttcaggattgcccttctgggccttgggggaagaacacctgcaaccatgatgaagacacgtgggtcgaatgtgaagatccctttgacttgagactagtaggaggagacaacctctgctctgggcgactggaggtgctgcacaagggcgtatggggctctgtctgtgatgacaactggggagaaaaggaggaccaggtggtatgcaagcaactgggctgtgggaagtccctctctccctccttcagagaccggaaatgctatggccctggggttggccgcatctggctggataatgttcgttgctcaggggaggagcagtccctggagcagtgccagcacagattttgggggtttcacgactgcacccaccaggaagatgtggctgtcatctgctcagga

SEQ ID NO: 4929 - DNA, 189 bp, Homo Sapiens
tgtattggagtactggagcagaacaatttttccctgaatagaagaatgcagaaagcacgtcattgtggccattgtcctgaggagtggattacatattccaacagttgttattacattggtaaggaaagaagaacttgggaagaaagagtttgctggcctgtgcttcgaagaactctgatctgctttcta

SEQ ID NO: 4930 - DNA, 948 bp, Homo Sapiens
atggccacgtttgtggagctcagtaccaaagccaagatgcccattgtgggcctgggcacttggaagtctcctcttggcaaagtgaaagaagcagtgaaggtggccattgatgcaggatatcggcacattgactgtgcctatgtctatcagaatgaacatgaagtgggggaagccatccaagagaagatccaagagaaggctgtgaagcgggaggacctgttcatcgtcagcaagttgtggcccactttctttgagagaccccttgtgaggaaagcctttgagaagaccctcaaggacctgaagctgagctatctggacgtctatcttattcactggccacagggattcaagtctggggatgaccttttccccaaagatgataaaggtaatgccatcggtggaaaagcaacgttcttggatgcctgggaggccatggaggagctggtggatgaggggctggtgaaagcccttggggtctccaatttcagccacttccagatcgagaagctcttgaacaaacctggactgaaatataaaccagtgactaaccaggttgagtgtcacccatacctcacacaggagaaactgatccagtactgccactccaagggcatcaccgttacggcctacagccccctgggctctccggatagaccttgggccaagccagaagacccttccctgctggaggatcccaagattaaggagattgctgcaaagcacaaaaaaaccgcagcccaggttctgatccgtttccatatccagaggaatgtgattgtcatccccaagtctgtgacaccagcacgcattgttgagaacattcaggtctttgactttaaattgagtgatgaggagatggcaaccatactcagcttcaacagaaactggagggcctgtaacgtgttgcaatcctctcatttggaagactatcccttcgatgcagaatat

SEQ ID NO: 4931 - DNA, 1131 bp, Homo Sapiens
gcttttgatcaaaaatcttacttttataggagcagttttcaactcctaaatgttgaatataatagtcagttaaattcaccagctacacaggaatacaggactttgagtggaagaattgaatctctgattactaaaacattcaaagaatcaaatttaagaaatcagttcatcagagctcatgttgccaaactgaggcaagatggtagtggtgtgagagcggatgttgtcatgaaatttcaattcactagaaataacaatggagcatcaatgaaaagcagaattgagtctgttttacgacaaatgctgaataactctggaaacctggaaataaacccttcaactgagataacatcacttactgaccaggctgcagcaaattggcttattaatgaatgtggggccggtccagacctaataacattgtctgagcagagaatccttggaggcactgaggctgaggagggaagctggccgtggcaagtcagtctgcggctcaataatgcccaccactgtggaggcagcctgatcaataacatgtggatcctgacagcagctcactgcttcagaagcaactctaatcctcgtgactggattgccacgtctggtatttccacaacatttcctaaactaagaatgagagtaagaaatattttaattcataacaattataaatctgcaactcatgaaaatgacattgcacttgtgagacttgagaacagtgtcacctttaccaaagatatccatagtgtgtgtctcccagctgctacccagaatattccacctggctctactgcttatgtaacaggatggggcgctcaagaatatgctggccacacagttccagagctaaggcaaggacaggtcagaataataagtaatgatgtatgtaatgcaccacatagttataatggagccatcttgtctggaatgctgtgtgctggagtacctcaaggtggagtggacgcatgtcagggtgactctggtggcccactagtacaagaagactcacggcggctttggtttattgtggggatagtaagctggggagatcagtgtggcctgccggataagccaggagtgtatactcgagtgacagcctaccttgactggattaggcaacaaactgggatc

SEQ ID NO: 4932 - DNA, 480 bp, Homo Sapiens
aaaaagaaagggtcccaaggtgccatccccccgccagacaaggcccagcacaatgactcagagcagactcagtcgccccagcagcctggctccaggaaccgggggcggggccaagggcggggcactgccatgcccggggaggaggtgctggagtccagccaagaggccctgcatgtgacggagcgcaaatacctgaagcgagactggtgcaaaacccagccgcttaagcagaccatccacgaggaaggctgcaacagtcgcaccatcatcaaccgcttctgttacggccagtgcaactctttctacatccccaggcacatccggaaggaggaaggttcctttcagtcctgctccttctgcaagcccaagaaattcactaccatgatggtcacactcaactgccctgaactacagccacctaccaagaagaagagagtcacacgtgtgaagcagtgtcgttgcatatccatcgatttggat

SEQ ID NO: 4933 - DNA, 2142 bp, Homo Sapiens
tccgaccggccccggggccgagacccggtcaacccagagaagctgctggtgatcactgtggccacagctgaaaccgaggggtacctgcgtttcctgcgctctgcggagttcttcaactacactgtgcggaccctgggcctgggagaggagtggcgagggggtgatgtggctcgaacagttggtggaggacagaaggtccggtggttaaagaaggaaatggagaaatacgctgaccgggaggatatgatcatcatgtttgtggatagctacgacgtgattctggccggcagccccacagagctgctgaagaagttcgtccagagtggcagccgcctgctcttctctgcagagagcttctgctggcccgagtgggggctggcggagcagtaccctgaggtgggcacggggaagcgcttcctcaattctggtggattcatcggttttgccaccaccatccaccaaatcgtgcgccagtggaagtacaaggatgatgacgacgaccagctgttctacacacggctctacctggacccaggactgagggagaaactcagccttaatctggatcataagtctcggatctttcagaacctcaacggggctttagatgaagtggttttaaagtttgatcggaaccgtgtgcgtatccggaacgtggcctacgacacgctccccattgtggtccatggaaacggtcccactaagctgcagctcaactacctgggaaactacgtccccaatggctggactcctgagggaggctgtggcttctgcaaccaggaccggaggacactcccgggggggcagcctcccccccgggtgtttctggccgtgtttgtggaacagcctactccgtttctgccccgcttcctgcagcggctgctactcctggactatccccccgacagggtcacccttttcctgcacaacaacgaggtcttccatgaaccccacatcgctgactcctggccgcagctccaggaccacttctcagctgtgaagctcgtggggccggaggaggctctgagcccaggcgaggccagggacatggccatggacctgtgtcggcaggaccccgagtgtgagttctacttcagcctggacgccgacgctgtcctcaccaacctgcagaccctgcgtatcctcattgaggagaacaggaaggtgatcgcccccatgctgtcccgccacggcaagctgtggtccaacttctggggcgccctgagccccgatgagtactacgcccgctccgaggactacgtggagctggtgcagcggaagcgagtgggtgtgtggaatgtaccatacatctcccaggcctatgtgatccggggtgataccctgcggatggagctgccccagagggatgtgttctcgggcagtgacacagacccggacatggccttctgtaagagctttcgagacaagggcatcttcctccatctgagcaatcagcatgaatttggccggctcctggccacttccagatacgacacggagcacctgcaccccgacctctggcagatcttcgacaaccccgtcgactggaaggagcagtacatccacgagaactacagccgggccctggaaggggaaggaatcgtggagcagccatgcccggacgtgtactggttcccactgctgtcagaacaaatgtgtgatgagctggtggcagagatggagcactacggccagtggtcaggcggccggcatgaggattcaaggctggctggaggctacgagaatgtgcccaccgtggacatccacatgaagcaggtggggtacgaggaccagtggctgcagctgctgcggacgtatgtgggccccatgaccgagagcctgtttcccggttaccacaccaaggcgcgggcggtgatgaactttgtggttcgctaccggccagacgagcagccgtctctgcggccacaccacgactcatccaccttcaccctcaacgttgccctcaaccacaagggcctggactatgagggaggtggctgccgcttcctgcgctacgactgtgtgatctcctccccgaggaagggctgggcactcctgcaccccggccgcctcacccactaccacgaggggctgccaacgacctggggcacacgctacatcatggtgtcctttgtcgacccc

SEQ ID NO: 4934 - DNA, 180 bp, Homo Sapiens
ggaaagctccctttctcaagaatgcccatctgtgaacacatggtagagtctccaacctgttcccagatgtccaacctggtctgcggcactgatgggctcacatatacgaatgaatgccagctctgcttggcccggataaaaaccaaacaggacatccagatcatgaaagatggcaaatgc

SEQ ID NO: 4935 - DNA, 1386 bp, Homo Sapiens
gggaagctactggtagtgcccatggatgggagccactggttcaccatgaggtcggtggtggagaaactcattctcagggggcatgaggtggttgtagtcatgccagaggtgagttggcaactgggaagatcactgaattgcacagtgaagacttattcaacttcatataccctggaggatctggaccgggagttcaaggcttttgcccatgctcaatggaaagcacaagtacgaagtatatattctctattaatgggttcatacaatgacatttttgacttatttttttcaaattgcaggagtttgtttaaagacaaaaaattagtagaatacttaaaggagagttcttttgatgcagtgtttctcgatccttttgataactgtggcttaattgttgccaaatatttctccctcccctccgtggtcttcgccaggggaatactttgccactatcttgaagaaggtgcacagtgccctgctcctctttcctatgtccccagaattctcttagggttctcagatgccatgactttcaaggagagagtacggaaccacatcatgcacttggaggaacatttattatgccaccgttttttcaaaaatgccctagaaatagcctctgaaattctccaaacacctgttacggagtatgatctctacagccacacatcaatttggttgttgcgaacggactttgttttggactatcccaaacccgtgatgcccaacatgatcttcattggtggtatcaactgccatcagggaaagccgttgcctatggaatttgaagcctacattaatgcttctggagaacatggaattgtggttttctctttgggatcaatggtctcagaaattccagagaagaaagctatggcaattgctgatgctttgggcaaaatccctcagacagtcctgtggcggtacactggaacccgaccatcgaatcttgcgaacaacacgatacttgttaagtggctaccccaaaacgatctgcttggtcacccgatgacccgtgcctttatcacccatgctggttcccatggtgtttatgaaagcatatgcaatggcgttcccatggtgatgatgcccttgtttggtgatcagatggacaatgcaaagcgcatggagactaagggagctggagtgaccctgaatgttctggaaatgacttctgaagatttagaaaatgctctaaaagcagtcatcaatgacaaaagttacaaggagaacatcatgcgcctctccagccttcacaaggaccgcccggtggagccgctggacctggccgtgttctgggtggagtttgtgatgaggcacaagggcgcgccacacctgcgccccgcagcccacgacctcacctggtaccagtaccattccttggac

SEQ ID NO: 4936 - DNA, 363 bp, Homo Sapiens
aaagacccaaaaaagaatgagacgggggtgctgaggaaattaaaacccgtcaatgcctcaaatgccaacgtgaagcagtgtctgtggtttgccatgcaagaatacaacaaagagagcgaggacaagtatgtcttcctggtggtcaagacactgcaagcccagcttcaggtcacaaatcttctggaataccttattgatgtagaaattgcccgcagcgattgcagaaagcctttaagcactaatgaaatctgcgccattcaagaaaactccaagctgaaaaggaaattaagctgcagctttttggtaggagcacttccctggaatggtgaattcactgtgatggagaaaaagtgtgaagatgct

SEQ ID NO: 4937 - DNA, 453 bp, Homo Sapiens
aatgccattcaggccaggtcttcctcctatagtggagagtatggaagtggtggtggaaagcgattctctcattctggcaaccagttggacggccccatcaccgccctccgggtccgagtcaacacatactacatcgtaggtcttcaggtgcgctatggcaaggtgtggagcgactatgtgggtggtcgcaacggagacctggaggagatctttctgcaccctggggaatcagtgatccaggtttctgggaagtacaagtggtacctgaagaagctggtatttgtgacagacaagggccgctatctgtcttttgggaaagacagtggcacaagtttcaatgccgtccccttgcaccccaacaccgtgctccgcttcatcagtggccggtctggttctctcatcgatgccattggcctgcactgggatgtttaccccactagctgcagcagatgc

SEQ ID NO: 4938 - DNA, 1128 bp, Homo Sapiens
tatcgcctcttccctggtgaacccaaatggaaaaaaaatactttgacatacagaatatctaaatacacaccttccatgagttctgtcgaggtggacaaagcagtggagatggccttgcaggcctggagtagcgccgtccctctgagctttgtcagaataaactcaggagaagcggatattatgatatcttttgaaaatggagatcacggggattcctatccattcgatgggcctcgggggactctagcccatgcatttgctcctggagaaggcctgggaggagatacacatttcgacaatgctgagaagtggactatgggaacgaatggttttaatttgtttaccgttgctgctcatgaatttggccatgccctgggcctggcccattccacagacccatcagcactgatgtacccaacttataagtacaagaatccctatggattccacctccccaaagatgatgtgaaagggatccaggcattatacggacctcggaaagtattcctggggaagcccactctgccccatgccccccatcacaagccatccatccctgacctctgtgactccagctcatcctttgacgctgtgacaatgctggggaaggagctcctgctcttcaaggaccggattttctggagacggcaggttcacttgcggacaggaattcggcccagcactattaccagctccttcccccagctcatgtccaatgtggatgcagcttacgaagtggctgagaggggcactgcttacttcttcaaaggtccccactactggataacaagaggattccaaatgcaaggtcctcctcggactatttatgactttggatttccaaggcacgtgcagcaaatagatgctgctgtctacctcagggagccacagaagacccttttctttgtgggagatgaatactacagctacgacgaaaggaaaaggaaaatggaaaaagactatccaaagaatactgaagaagaattttcaggagtaaatggccaaatcgatgctgctgtagaattaaatggctacatttacttcttttcaggaccaaaaacatacaagtatgacacagagaaggaagatgtggttagtgtggtgaaatctagttcctggattggttgc

SEQ ID NO: 4939 - DNA, 273 bp, Homo Sapiens
tgccaggaggctaactacggtgccctcctccgggagctctgcctcacccagttccaggtagacatggaggccgtcggggagacgctgtggtgtgactggggcaggaccatcaggagctacagggagctggccgactgcacctggcacatggcggagaagctgggctgcttctggcccaatgcagaggtggacaggttcttcctggcagtgcatggccgctacttcaggagctgccccatctcaggcagggccgtgcgggacccgcccggcagc

SEQ ID NO: 4940 - DNA, 309 bp, Homo Sapiens
cagcctcttcccaccacaggcacaccagggtcagaaggggggacggtgaagaactatgagacagctgtccaattttgctggaatcattataaggatcaaatggatcctatcgaaaaggattggtgcgactgggccatgattagcaggccttatagcaccctgcgagattgcctggagcactttgcagagttgtttgacctgggcttccccaatcccttggcagagaggatcatctttgagactcaccagatccactttgccaactgctccctggtgcagcccaccttctctgaccccccagaggatgta

SEQ ID NO: 4941 - DNA, 285 bp, Homo Sapiens
agagcaggcggctgcaacgagacaggcatgttggagaggctgcccctgtgtgggaaggctttcgcagacatgatgggcaaggtggacgtctggaagtggtgcaacctgtccgagttcatcgtgtactatgagagtttcaccaactgcaccgagatggaggccaatgtcgtgggctgctactggcccaaccccctggcccagggcttcatcaccggcatccacaggcagttcttctccaactgcaccgtggacagggtccacttggaggaccccccagacgaggtt

SEQ ID NO: 4942 - DNA, 663 bp, Homo Sapiens
cttcccaaatctgtggattggagaaagaaaggctacgtgacgccagtgaagaatcagaaacagtgtggttcttgttgggcttttagtgcgactggtgctcttgaaggacagatgttccggaaaactgggaaacttgtctcactgagcgagcagaatctggtggactgttcgcgtcctcaaggcaatcagggctgcaatggtggcttcatggctagggccttccagtatgtcaaggagaacggaggcctggactctgaggaatcctatccatatgtagcagtggatgaaatctgtaagtacagacctgagaattctgttgctaatgacactggcttcacagtggtcgcacctggaaaggagaaggccctgatgaaagcagtcgcaactgtggggcccatctccgttgctatggatgcaggccattcgtccttccagttctacaaatcaggcatttattttgaaccagactgcagcagcaaaaacctggatcatggtgttctggtggttggctacggctttgaaggagcaaattcgaataacagcaagtattggctcgtcaaaaacagctggggtccagaatggggctcgaatggctatgtaaaaatagccaaagacaagaacaaccactgtggaatcgccacagcagccagctaccccaatgtg

SEQ ID NO: 4943 - DNA, 672 bp, Homo Sapiens
cagccgtaccacggagagaagggcatctccgtgccggaccacggcttctgccagcccatctccatcccgctgtgcacggacatcgcctacaaccagaccatcctgcccaacctgctgggccacacgaaccaagaggacgcgggcctcgaggtgcaccagttctacccgctggtgaaggtgcagtgttctcccgaactccgctttttcttatgctccatgtatgcgcccgtgtgcaccgtgctcgatcaggccatcccgccgtgtcgttctctgtgcgagcgcgcccgccagggctgcgaggcgctcatgaacaagttcggcttccagtggcccgagcggctgcgctgcgagaacttcccggtgcacggtgcgggcgagatctgcgtgggccagaacacgtcggacggctccgggggcccaggcggcggccccactgcctaccctaccgcgccctacctgccggacctgcccttcaccgcgctgcccccgggggcctcagatggcagggggcgtcccgccttccccttctcatgcccccgtcagctcaaggtgcccccgtacctgggctaccgcttcctgggtgagcgcgattgtggcgccccgtgcgaaccgggccgtgccaacggcctgatgtactttaaggaggaggagaggcgcttcgcccgcctctgg

SEQ ID NO: 4944 - DNA, 2172 bp, Homo Sapiens
cagcctccccactgcccctctgtatcccatagggcccagccctggccacaccctggccagagccagctgtttgcagacctgagccgagaggagttgacagctgtgatgcgctttctgacccagcggctggggccagggctggtggacgcagcccaggctcagccctcggacaactgcatcttctcagtggagctgcagctgccccccaaggctgcagccctggcccacctggacagggggagccccccacctgcccgggaggcactggccatcgtcctctttggtggacaaccccaacccaatgtgagtgagctggtggtggggccgctgcctcacccctcgtacatgcgggatgtgactgtggagcgtcacggcgggcccctgccctatcaccgtcgcccggtgctgagagctgagtttacacagatgtggaggcatctgaaagaggtggagctacccaaggcacccatcttcctgtcgtccaccttcaactacaatggctctaccctggcagctgtgcatgccacccctcggggcttgcgctcaggggaccgagctacctggatggccctctaccataacatctcaggggttggtcttttccttcaccccgtggggctggagctactactggaccacagggcactggaccctgcccactggactgtccagcaggtcttctaccttgggcactactatgcagacttgggccagttggaacgggagtttaagtctggccggttggaagtggttagagtccctctacctccaccaaatggagcttcatccctgaggtctcggaactctccaggtcctcttccccctcttcagttctcgccccagggttcccagtacagtgtgcaaggaaacctggtggtatcctccctctggtcatttacctttggccatggggtgttcagcggcctgaggatttttgatgttcggttccagggtgagcgaatagcctatgaagtcagtgtccaggagtgtgtatctatctatggtgccgattcacccaagacgatgctgactcgctatttggatagcagctttggactcggccgtaacagccgaggcttggtgcggggagtggactgcccctatcaagccacgatggtggacatccatatattagtgggcaaaggggcagtccagctgcttccaggggctgtgtgtgtatttgaggaagcccagggactgccccttcgaaggcaccacaattaccttcaaaatcatttctatggtggtttggccagctcagcccttgtggtcaggtctgtgtcatctgtgggcaactatgactacatttgggactttgtgttgtacccaaatggggcacttgaagggcgggtccatgccacgggttatatcaacacagctttcctgaaagggggagaggagggcctcctctttgggaaccgtgtgggggaaagagtgctgggaacggtgcacacacatgccttccacttcaagctggacctggatgtggcagggctgaaaaactgggtggtagctgaagacgtggtgtttaaacctgtggctgccccctggaacccggagcactggctacagcgcccacagctgactcggcaggtcctgggaaaggaggacctgacagctttttccttgggaagccccctaccccgctacctctacctggctagcaaccagactaatgcgtggggtcaccagcgcgggtaccgaatccagatccacagcccccttggcatacacatacccctggagagtgacatggagagggccctcagctgggggagataccagcttgtggtgacccagagaaaggaggaggagtcacagagcagtagcatctatcaccagaatgacatctggacacccacagttacctttgctgacttcatcaacaatgaaaccctcttaggagaggatctggtggcttgggtcacagccagcttcctgcacattccccatgccgaggacatcccaaacacagtgactctggggaacagagttggcttcttgctccgaccctataacttctttgatgaggacccctccatcttctcccctggcagtgtctactttgagaagggccaggatgctgggctctgcagcatcaatcctgtggcctgcctccccgacctggcagcctgtgtcccggacttaccccctttctcttaccacggcttc

SEQ ID NO: 4945 - DNA, 1194 bp, Homo Sapiens
cggatggccaagaagcgggtcatcgtgaagaagttacccatcgtggagactttaggttgctgcagcgttctctgttctgacaagacggggactctgactgccaatgaaatgacagtgacccagcttgtaacgtcagatgggcttcgtgccgaggtcagcggagttgggtatgacggtcaagggactgtgtgtcttctaccatccaaggaagtcattaaggaattttccaatgtctcagtgggaaagttagtggaggcgggctgtgttgccaacaatgcggtcatcagaaagaacgccgtgatggggcagcccaccgagggtgcattgatggccctggcgatgaagatggacttaagtgatattaaaaattcatatataagaaaaaaagagattccattcagttcagagcagaagtggatggcggtgaaatgcagtctgaagactgaggatcaggaagacatttacttcatgaaaggggccttggaagaggtgatccgctactgcaccatgtacaacaacgggggcatccccctgccgctgacgccccagcagaggtcattctgcctgcaggaagagaagaggatggggtcgctcggtttgcgggtgctggccctggcttctgggcccgagctggggcggctgacgtttctcggtcttgtgggcatcattgaccccccgagagttggcgtgaaggaagcagtccaggttctctccgagtctggtgtgtctgtgaagatgataacgggggatgccctggagacggccttggccataggaagaaacatcggcctgtgcaacgggaagctgcaagccatgtccggggaggaggtggacagcgtggagaagggcgagctggccgaccgcgtggggaaggtgtccgtgttcttcaggaccagcccaaagcacaagctcaaaatcatcaaggctctgcaggagtcaggggcgatcgtggccatgactggggatggggtgaacgacgcagtggccctgaagtctgcagacattgggatcgccatggggcagacagggacggacgtcagcaaagaggccgccaacatgatcctggtggatgatgacttctcagccatcatgaatgcagtggaggaaggcaagggtattttttacaacatcaaaaactttgtccgattccagctgagcacgagcatctccgccctgagtctcatcactctgtcc

SEQ ID NO: 4946 - DNA, 1413 bp, Homo Sapiens
agttgtggaaaagtgctggtgtgggccgcagaatacagccattggatgaatatgaagacaatcctgaaagagcttgttcagagaggtcatgaggtgactgtactggcatcttcagcttccattctttttgatcccaatgatgcatccactcttaaatttgaagtttatcctacatctttaactaaaactgaatttgagaatatcatcatgcaacaggttaagagatggtcagacattcgaaaagatagcttttggttatatttttcacaagaacaagaaatcctgtgggaattatatgacatatttagaaacttctgtaaagatgtagtttcaaataagaaagttatgaaaaaactacaagagtcaagatttgacatcgtttttgcagatgctgtttttccctgtggtgagctgctggctgcgctacttaacatacggtttgtgtacagtctccgctttactcctggctacacaattgaaaggcacagtggaggactgattttccctccttcctacatacctattgttatgtcaaaattaagtgatcaaatgactttcatggagagggtaaaaaatatgatctatgtgctttattttgacttttggttccaaatgtctgatatgaagaagtgggatcagttttacagtgaagttttaggaagacccactaccttatttgagacaatgggaaaagctgacatatggcttatgcgaaactcctggagttttcaatttcctcatccattcttaccaaacgttgattttgttggaggattccactgcaaacctgccaaacccctacctaaggaaatggaggagtttgtacagagctctggagaaaatggtgttgtggtgttttctctggggtcagtgataagtaacatgacagcagaaagggccaatgtaattgcaacagcccttgccaagatcccacaaaaggttctgtggagatttgacgggaataaaccagatgccttaggtctcaatactcggctgtacaagtggataccccagaatgaccttctaggtcatccaaaaaccagagcttttataactcatggtggagccaatggcatctatgaggcaatctaccatgggatccctatggtgggcattccattgttttttgatcaacctgataacattgctcacatgaaggccaagggagcagctgttagattggacttcaacacaatgtcgagtacagacctgctgaatgcactgaagacagtaattaatgatcctttatataaagagaatattatgaaattatcaagaattcaacatgatcaaccagtaaagcccctggatcgagcagtcttctggattgaatttgtcatgccccacaaaggagccaaacaccttcgagttgcagcccatgacctcacctggttccagtaccactctttggat

SEQ ID NO: 4947 - DNA, 666 bp, Homo Sapiens
gcaagatctcgaagtgctccaatgtcaccttctgattttctggataaattaatgggcaggacatcaggatatgatgcaagaatcagacccaattttaaaggccctccagttaatgtcacatgcaacatattcatcaacagctttggctctatcgcagagacgaccatggattacagagtgaatatctttcttcgtcagaaatggaatgatccccgcctcgcgtacagtgaatatcctgacgactctttagacctcgacccctccatgttggactccatttggaaacctgatttgttctttgccaatgaaaagggtgccaactttcatgaagtcactacagacaacaaattgctaagaattttcaaaaatggaaatgttctttattcaataagattaacattaacactttcctgtccaatggatctcaagaattttcccatggatgtacaaacatgtataatgcaactggaaagctttgggtacacaatgaatgatctcatttttgaatggcaagatgaggcacccgtacaagtggcagaaggactcactttgccccagtttctgttgaaagaagaaaaagatttacgatactgcactaaacattacaatacaggaaagtttacgtgtatagaagtgcgattccatctggagcgacaaatgggatac

SEQ ID NO: 4948 - DNA, 1212 bp, Homo Sapiens
aaccagcagacttggtttgagggtatcttcctgtcttccatgtgccccatcaatgtcagcgccagcaccttgtatggaattatgtttgatgcagggagcactggaactcgaattcatgtttacacctttgtgcagaaaatgccaggacagcttccaattctagaaggggaagtttttgattctgtgaagccaggactttctgcttttgtagatcaacctaagcagggtgctgagaccgttcaagggctcttagaggtggccaaagactcaatcccccgaagtcactggaaaaagaccccagtggtcctaaaggcaacagcaggactacgcttactgccagaacacaaagccaaggctctgctctttgaggtaaaggagatcttcaggaagtcacctttcctggtaccaaagggcagtgttagcatcatggatggatccgacgaaggcatattagcttgggttactgtgaattttctgacaggtcagctgcatggccacagacaggagactgtggggaccttggacctagggggagcctccacccaaatcacgttcctgccccagtttgagaaaactctggaacaaactcctaggggctacctcacttcctttgagatgtttaacagcacttataagctctatacacatagttacctgggatttggattgaaagctgcaagactagcaaccctgggagccctggagacagaagggactgatgggcacactttccggagtgcctgtttaccgagatggttggaagcagagtggatctttgggggtgtgaaataccagtatggtggcaaccaagaaggggaggtgggctttgagccctgctatgccgaagtgctgagggtggtacgaggaaaacttcaccagccagaggaggtccagagaggttccttctatgctttctcttactattatgaccgagctgttgacacagacatgattgattatgaaaaggggggtattttaaaagttgaagattttgaaagaaaagccagggaagtgtgtgataacttggaaaacttcacctcaggcagtcctttcctgtgcatggatctcagctacatcacagccctgttaaaggatggctttggctttgcagacagcacagtcttacagctcacaaagaaagtgaacaacatagagacgggctgggccttgggggccacctttcacctgttgcagtctctgggcatctcccat

SEQ ID NO: 4949 - DNA, 1695 bp, Homo Sapiens
atggaggactcggactcggcggcaaagcagctgggcctggctgaggcggcggcggtggcggccgcggccgctgtggcggcggcggccgcggccgcggcaggaggcgaggcggaggagccggtgctgagcagggacgaggactcggaggaggacgcagactcggaggcggagcgggagacgccgcgggtcacggcagtggcggtgatggcggcggagcccgggcacatggacatgggcgccgaggccctgcccggccccgacgaggccgccgctgccgcagccttcgcagaggtgaccacagtgacagtggccaacgtgggggctgctgcagacaatgtcttcaccacgtctgtggcgaacgcggcatccatctcaggacatgttctgtctggtaggacggcccttcagatcggggacagcctgaacaccgaaaaagcgacactgattgtcgtccacacagatgggagcatcgtggagaccaccgggctgaaaggcccggcagctcccctcaccccaggtcctcagtctcctccaacccctctggctcccggccaagaaaaaggtggaactaaatacaactgggacccttctgtgtacgacagtgagctgcccgtacggtgccggaacatcagcggcactctgtacaagaacaggctcggctcaggcggccggggacggtgcatcaagcagggggagaactggtacagtcccaccgagtttgaggccatggcaggaagagccagcagtaaggactggaaaagaagcattcgctacgcgggccgacccttgcagtgcctcatccaggatgggatcttaaaccctcacgctgcctcttgcacctgtgctgcctgctgcgacgacatgaccttaagtggcccagtcaggctttttgtgccttacaaaaggcgcaagaaggagaatgaactgcccacaactcccgtgaagaaggactcccccaagaacatcacattgcttccagccaccgcggctaccaccttcaccgtgaccccctcgggacagatcacgacctcgggggcactgacctttgaccgagcgtccacggtagaggccactgctgtcatatcagagagtccggcccagggcgacgtcttcgcaggggccacagtccaagaggccagcgtgcagcccccatgcagggccagccaccctgagcctcactaccccggctatcaggacagctgccagatcgcaccgtttccagaagctgcgttgccaacgtcacatcccaaaatagtgttgacatccctgcctgcgctggcggtcccacccccgactcccaccaaagcggcacctcccgcgttggtcaatgggctggagctgtcagagccgcggagctggctgtacctagaagagatggtcaactccttgctcaacacagcgcagcagctgaagacgctgtttgagcaagccaagcatgccagcacctaccgagaagctgccacaaaccaggccaagatccacgctgacgcagagcggaaggagcagtcctgcgttaactgcggccgggaggctatgagcgagtgcaccggctgccacaaggtcaactactgctccaccttctgccaacgcaaggactggaaggatcaccagcacatatgcggccagtcagcagctgtcaccgtccaggcagacgaagtccacgtggctgaaagcgtgatggagaaggtgaccgtg

SEQ ID NO: 4950 - DNA, 1533 bp, Homo Sapiens
gcgctgctggctgccgagctcaagtcgaaaagttgctcggaagtgcgacgtctttacgtgtccaaaggcttcaacaagaacgatgcccccctccacgagatcaacggtgatcatttgaagatctgtccccagggttctacctgctgctctcaagagatggaggagaagtacagcctgcaaagtaaagatgatttcaaaagtgtggtcagcgaacagtgcaatcatttgcaagctgtctttgcttcacgttacaagaagtttgatgaattcttcaaagaactacttgaaaatgcagagaaatccctgaatgatatgtttgtgaagacatatggccatttatacatgcaaaattctgagctatttaaagatctcttcgtagagttgaaacgttactacgtggtgggaaatgtgaacctggaagaaatgctaaatgacttctgggctcgcctcctggagcggatgttccgcctggtgaactcccagtaccactttacagatgagtatctggaatgtgtgagcaagtatacggagcagctgaagcccttcggagatgtccctcgcaaattgaagctccaggttactcgtgcttttgtagcagcccgtactttcgctcaaggcttagcggttgcgggagatgtcgtgagcaaggtctccgtggtaaaccccacagcccagtgtacccatgccctgttgaagatgatctactgctcccactgccggggtctcgtgactgtgaagccatgttacaactactgctcaaacatcatgagaggctgtttggccaaccaaggggatctcgattttgaatggaacaatttcatagatgctatgctgatggtggcagagaggctagagggtcctttcaacattgaatcggtcatggatcccatcgatgtgaagatttctgatgctattatgaacatgcaggataatagtgttcaagtgtctcagaaggttttccagggatgtggaccccccaagcccctcccagctggacgaatttctcgttccatctctgaaagtgccttcagtgctcgcttcagaccacatcaccccgaggaacgcccaaccacagcagctggcactagtttggaccgactggttactgatgtcaaggagaaactgaaacaggccaagaaattctggtcctcccttccgagcaacgtttgcaacgatgagaggatggctgcaggaaacggcaatgaggatgactgttggaatgggaaaggcaaaagcaggtacctgtttgcagtgacaggaaatggattagccaaccagggcaacaacccagaggtccaggttgacaccagcaaaccagacatactgatccttcgtcaaatcatggctcttcgagtgatgaccagcaagatgaagaatgcatacaatgggaacgacgtggacttctttgatatcagtgatgaaagtagtggagaaggaagtggaagtggctgtgagtatcagcagtgcccttcagagtttgactacaatgccactgaccatgctgggaagagtgccaatgagaaagccgacagt

SEQ ID NO: 4951 - DNA, 915 bp, Homo Sapiens
cacatcggaccagcacctgaccccgaggactggtggagctacaaggataatctccagggaaacttcgtgccagggcctcctttctggggcctggtgaatgcagcgtggagtctgtgtgctgtggggaagcggcagagccccgtggatgtggagctgaagagggttctttatgacccctttctgcccccattaaggctcagcactggaggagagaagctccggggaaccttgtacaacaccggccgacatgtctccttcctgcctgcaccccgacctgtggtcaatgtgtctggaggtcccctcctttacagccaccgactcagtgaactgcggctgctgtttggagctcgcgacggagccggctcggaacatcagatcaaccaccagggcttctctgctgaggtgcagctcattcacttcaaccaggaactctacgggaatttcagcgctgcctcccgcggccccaatggcctggccattctcagcctctttgtcaacgttgccagtacctctaacccattcctcagtcgcctccttaaccgcgacaccatcactcgcatctcctacaagaatgatgcctactttcttcaagacctgagcctggagctcctgttccctgaatccttcggcttcatcacctatcagggctctctcagcaccccgccctgctccgagactgtcacctggatcctcattgaccgggccctcaatatcacctcccttcagatgcactccctgagactcctgagccagaatcctccatctcagatcttccagagcctcagcggtaacagccggcccctgcagcccttggcccacagggcactgaggggcaacagggacccccggcaccccgagaggcgctgccgaggccccaactaccgcctgcatgtggatggtgtcccccatggtcgc

SEQ ID NO: 4952 - DNA, 951 bp, Homo Sapiens
tcccgggtctcgggcatcccctcccggcgccactggccggtgccctacaagcgctttgacttccgtccaaaacctgatccttattgtcaagctaagtatactttctgtccaactggctcacctatcccagttatggagggtgatgatgacattgaagtttttcgattacaagccccagtatgggaatttaaatatggagacctcctgggacacttgaaaattatgcatgatgccattggattcagaagtacattaactggcaagaactacacaatggaatggtatgaacttttccaacttggcaactgtacatttccccatctccgacctgaaatggatgcccctttctggtgtaatcaaggcgctgcctgcttttttgagggaattgatgatgttcactggaaggaaaatgggacattagttcaagtagcaactatatcaggaaacatgttcaaccaaatggcaaagtgggtgaaacaggacaatgaaacaggaatttattatgagacatggaatgtaaaagccagcccagaaaagggggcagagacatggtttgattcctacgactgttccaaatttgtgttaaggacctttaacaagttggctgaatttggagcagagttcaagaacatagaaaccaactatacaagaatatttctttacagtggagaacctacttatctgggaaatgaaacatctgtttttgggccaacaggaaacaagactcttggtttagccataaaaagattttattaccccttcaaaccacatttgccaactaaagaatttctgttgagtctcttgcaaatttttgatgcagtgattgtgcacaaacagttctatttgttttataattttgaatattggtttttacctatgaaattcccttttattaaaataacatatgaagaaatccctttacctatcagaaacaaaacactctctggttta

SEQ ID NO: 4953 - DNA, 180 bp, Homo Sapiens
gtgaccacctccaccaatgactgggtggtgacctgcggctacaccatccccacctgccgcaagctggatgagctgggctccaaggggctgtgggccgactgcgtcatggccacggggctgtaccactgcaagcccctggtggacatcctcatcctgccgggctacgtgcaggcctgccgc

SEQ ID NO: 4954 - DNA, 231 bp, Homo Sapiens
gattctggctgcaaactcctggaggacatggttgaaaagaccatcaattccgacatatctatacctgaatacaaagagcttcttcaagagttcatagacagtgatgccgctgcagaggctatggggaaattcaagcagtgtttcctcaaccagtcacatagaactctgaaaaactttggactgatgatgcatacagtgtacgacagcatttggtgtaatatgaagagtaat

SEQ ID NO: 4955 - DNA, 870 bp, Homo Sapiens
aggttcagccagagcttccgagaggtggccggcaggttcctggcgttggaggccagcacacacctgctggtgttcggcatggagcagcggctgccgcccaacagcgagctggtgcaggccgtgctgcggctcttccaggagccggtccccaaggccgcgctgcacaggcacgggcggctgtccccgcgcagcgcccgggcccgggtgaccgtcgagtggctgcgcgtccgcgacgacggctccaaccgcacctccctcatcgactccaggctggtgtccgtccacgagagcggctggaaggccttcgacgtgaccgaggccgtgaacttctggcagcagctgagccggccccggcagccgctgctgctacaggtgtcggtgcagagggagcatctgggcccgctggcgtccggcgcccacaagctggtccgctttgcctcgcagggggcgccagccgggcttggggagccccagctggagctgcacaccctggaccttggggactatggagctcagggcgactgtgaccctgaagcaccaatgaccgagggcacccgctgctgccgccaggagatgtacattgacctgcaggggatgaagtgggccgagaactgggtgctggagcccccgggcttcctggcttatgagtgtgtgggcacctgccggcagcccccggaggccctggccttcaagtggccgtttctggggcctcgacagtgcatcgcctcggagactgactcgctgcccatgatcgtcagcatcaaggagggaggcaggaccaggccccaggtggtcagcctgcccaacatgagggtgcagaagtgcagctgtgcctcggatggtgcgctcgtgccaaggaggctccagcca

SEQ ID NO: 4956 - DNA, 567 bp, Homo Sapiens
cgcggcggccgggaccacggggactgggacgaggcctcccggctgccgccgctaccaccccgcgaggacgcggcgcgcgtggcccgcttcgtgacgcacgtctccgactggggcgctctggccaccatctccacgctggaggcggtgcgcggccggcccttcgccgacgtcctctcgctcagcgacgggcccccgggcgcgggcagcggcgtgccctatttctacctgagcccgctgcagctctccgtgagcaacctgcaggagaatccatatgctacactgaccatgactttggcacagaccaacttctgcaagaaacatggatttgatccacaaagtcccctttgtgttcacataatgctgtcaggaactgtgaccaaggtgaatgaaacagaaatggatattgcaaagcattcgttattcattcgacaccctgagatgaaaacctggccttccagccataattggttctttgctaagttgaatataaccaatatctgggtcctggactactttggtggaccaaaaatcgtgacaccagaagaatattataatgtcacagttcag

SEQ ID NO: 4957 - DNA, 795 bp, Homo Sapiens
caggaacaccccagctgcccaggacccagggaactggaagccagcaaagttgtcctcctgcccagttgtcccggagctccaggaagtcctggggagaagggagccccaggtcctcaagggccacctggaccaccaggcaagatgggccccaagggtgagccaggccccagaaactgccgggagctgttgagccagggcgccaccttgagcggctggtaccatctgtgcctacctgagggcagggccctcccagtcttttgtgacatggacaccgaggggggcggctggctggtgtttcagaggcgccaggatggttctgtggatttcttccgctcttggtcctcctacagagcaggttttgggaaccaagagtctgaattctggctgggaaatgagaatttgcaccagcttactctccagggtaactgggagctgcgggtagagctggaagactttaatggtaaccgtactttcgcccactatgcgaccttccgcctcctcggtgaggtagaccactaccagctggcactgggcaagttctcagagggcactgcaggggattccctgagcctccacagtgggaggccctttaccacctatgacgctgaccacgattcaagcaacagcaactgtgcagtgattgtccacggtgcctggtggtatgcatcctgttaccgatcaaatctcaatggtcgctatgcagtgtctgaggctgccgcccacaaatatggcattgactgggcctcaggccgtggtgtgggccacccctaccgcagggttcggatgatgcttcga

SEQ ID NO: 4958 - DNA, 234 bp, Homo Sapiens
atgcctgcaaatcgcctctcttgctacagaaagatactaaaagatcacaactgtcacaaccttccggaaggagtagctgacctgacacagattgatgtcaatgtccaggatcatttctgggatgggaagggatgtgagatgatctgttactgcaacttcagcgaattgctctgctgcccaaaagacgttttctttggaccaaagatctctttcgtgattccttgcaacaatcaa

SEQ ID NO: 4959 - DNA, 600 bp, Homo Sapiens
agtcccaagcaggagaagatgaagatggattgccacaaagacgagaaaggcaccatctatgactatgaggccatcgcacttaataagaatgaatatgtttccttcaagcagtatgtgggcaagcacatcctcttcgtcaacgtggccacctactgtggtctgacagcgcaatatcctgaactaaatgcactccaggaggagctgaagccctatggtctagttgtgttgggctttccctgcaaccaatttggaaagcaagaaccaggagataacaaagagattcttcctgggctcaagtatgtccgtccagggggaggatttgtacctagtttccagctttttgagaaaggggatgtgaatggtgaaaaagaacagaaagtcttcagtttcttgaagcactcctgtcctcatccctctgagattttgggcacattcaaatctatatcctgggaccctgtaaaggtccatgacatccgttggaactttgaaaagttcctggtggggcctgatggaatccctgtcatgcgctggtcccaccgggctacggtcagctcagtcaagacagacatcctggcgtacttgaagcaattcaaaaccaaa

SEQ ID NO: 4960 - DNA, 1125 bp, Homo Sapiens
caatacgaacgctacagcttccgcagcttcccacgggacgagctgatgccgctcgagtcggcctaccggcacgcgctggacaagtacagcggcgagcactgggccgagagcgtgggctacctggagatcagcctgcggctgcaccgcttgctgcgcgacagcgaggccttctgccaccgcaactgcagcgccgcgccgcagcccgagcccgccgccggcctcgccagctatcccgagctgcgcctcttcgggggcctgctgcgccgcgcgcactgcctcaagcgctgcaagcagggcctgccagccttccgccagtcccagcccagccgcgatgtgctggcggacttccagcgccgcgagccctacaagttcctgcagttcgcttacttcaaggcaaataatctccccaaagccatcgccgctgctcacacctttctactgaagcatcctgatgacgaaatgatgaagaggaacatggcatattataagagcctgcctggtgccgaggactacattaaagacctggaaaccaagtcatatgaaagcctgttcatccgagcagtgcgggcatacaacggtgagaactggagaacatccatcacagacatggagctggcccttcccgacttcttcaaagccttttacgagtgtctcgcagcctgcgagggttccagggagatcaaggacttcaaggatttctacctttccatagcagatcattatgtagaagttctggaatgcaaaatacagtgtgaagagaacctcaccccagttataggaggctatccggttgagaaatttgtggctaccatgtatcattacttgcagtttgcctattataagttgaacgacctgaagaatgcagccccctgtgcagtcagctatctgctctttgatcagaatgacaaggtcatgcagcagaacctggtgtattaccagtaccacagggacacgtggggcctctcagatgagcacttccagcccagacctgaagcagttcagttctttaatgtgaccacactccagaaggagctgtatgactttgctaaggaaaatataatggatgatgatgagggagaagttgtggaatatgtggatgacctcttggaactggaggagaccagc

SEQ ID NO: 4961 - DNA, 858 bp, Homo Sapiens
aacgagtttagtatattaaaatcaccagggtctgttgttttccgaaatggaaattggcctataccaggagagcggatcccagacgtggctgcattgtccatgggcttctctgtgaaagaagacctttcttggccaggactcgcagtgggtaacctgtttcatcgtcctcgggctaccgtcatggtgatggtgaagggagtgaacaaactggctctacccccaggcagtgtcatttcgtaccctttggagaatgcagttccttttagtcttgacagtgttgcaaattccattcactccttattttctgaggaaactcctgttgttttgcagttggctcccagtgaggaaagagtgtatatggtagggaaggcaaactcagtgtttgaagacctttcagtcaccttgcgccagctccgtaatcgcctgtttcaagaaaactctgttctcagttcactccccctcaattctctgagtaggaacaatgaagttgacctgctctttctttctgaactgcaagtgctacatgatatttcaagcttgctgtctcgtcataagcatctagccaaggatcattctcctgatttatattcactggagctggcaggtttggatgaaattgggaagcgttatggggaagactctgaacaattcagagatgcttctaagatccttgttgacgctctgcaaaagtttgcagatgacatgtacagtctttatggtgggaatgcagtggtagagttagtcactgtcaagtcatttgacacctccctcattaggaagacaaggactatccttgaggcaaaacaagcgaagaacccagcaagtccctataaccttgcatataagtataattttgaa

SEQ ID NO: 4962 - DNA, 1413 bp, Homo Sapiens
ggaaaggtgctggtgtggcccacagaatacagccattggataaatatgaagacaatcctggaagagcttgttcagaggggtcatgaggtgattgtgttgacatcttcggcttctattcttgtcaatgccagtaaatcatctgctattaaattagaagtttatcctacatctttaactaaaaatgatttggaagatttttttatgaaaatgttcgatagatggacatatagtatttcaaaaaatacattttggtcatatttttcacaactacaagaattgtgttgggaatattctgactataatataaagctctgtgaagatgcagttttgaacaagaaacttatgagaaaactacaagagtcaaaatttgatgtccttctggcagatgccgttaatccctgtggtgagctgctggctgaactacttaacataccctttctgtacagtctccgcttctctgttggctacacagttgagaagaatggtggaggatttctgttccctccttcctatgtacctgttgttatgtcagaattaagtgatcaaatgattttcatggagaggataaaaaatatgatatatatgctttattttgacttttggtttcaagcatatgatctgaagaagtgggaccagttttatagtgaagttctaggaagacccactacattatttgagacaatggggaaagctgaaatgtggctcattcgaacctattgggattttgaatttcctcgcccattcttaccaaatgttgattttgttggaggacttcactgtaaaccagccaaacccttgcctaaggaaatggaagagtttgtgcagagctctggagaaaatggtattgtggtgttttctctggggtcgatgatcagtaacatgtcagaagaaagtgccaacatgattgcatcagcccttgcccagatcccacaaaaggttctatggagatttgatggcaagaagccaaatactttaggttccaatactcgactgtataagtggttaccccagaatgaccttcttggtcatcccaaaaccaaagcttttataactcatggtggaaccaatggcatctatgaggcgatctaccatgggatccctatggtgggcattcccttgtttgcggatcaacatgataacattgctcacatgaaagccaagggagcagccctcagtgtggacatcaggaccatgtcaagtagagatttgctcaatgcattgaagtcagtcattaatgaccctatctataaagagaatatcatgaaattatcaagaattcatcatgatcaaccggtgaagcccctggatcgagcagtcttctggattgagtttgtcatgcgccataaaggagccaagcaccttcgggtcgcagcccacaacctcacctggatccagtaccactctttggatgtg

SEQ ID NO: 4963 - DNA, 1161 bp, Homo Sapiens
tcaagatgctcagctcaaaaaaataccgaatttgcagtggatctttatcaagaggtttccttatctcataaggacaacattatattttcaccccttggaataactttggttcttgagatggtacaactgggagccaaaggaaaagcacagcagcagataagacaaactttaaaacaacaggaaacctcagctggggaagaattttttgtactgaagtcatttttctctgccatctcagagaaaaaacaagaatttacatttaatcttgccaatgccctctaccttcaagaaggattcactgtgaaagaacagtatctccatggcaacaaggaattttttcagagtgctataaaactggtggattttcaagatgcaaaggcttgtgcagagatgataagtacctgggtagaaagaaaaacagatggaaaaattaaagacatgttttcaggggaagaatttggccctctgactcggcttgtcctggtgaatgctatttatttcaaaggagattggaaacagaaattcagaaaagaggacacacagctgataaattttactaagaaaaatggttcaactgtcaaaattccaatgatgaaggctcttctgagaacaaaatatggttatttttctgaatcttccctgaactaccaagttttagaattgtcttacaaaggtgatgaatttagcttaattatcatacttcctgcagaaggtatggatatagaagaagtggaaaaactaattactgctcaacaaatcctaaaatggctctctgagatgcaagaagaggaagtagaaataagcctccctagatttaaagtagaacaaaaagtagacttcaaagacgttttgtattctttgaacataaccgagatatttagtggtggctgcgacctttctggaataacagattcatctgaagtgtatgtttcccaagtgacgcaaaaagttttctttgagataaatgaagatggtagtgaagctgcaacatcaactggcatacacatccctgtgatcatgagtctggctcaaagccaatttatagcaaatcatccatttctgtttattatgaagcataatccaacagaatcaattctgtttatgggaagagtgacaaatcctgacacccaggagataaaaggaagagatttagattcactg

SEQ ID NO: 4964 - DNA, 387 bp, Homo Sapiens
agcctcatcagtcgctgtgacttggcccaggtgctgcagctggaggacttggatgggtttgagggttactccctgagtgactggctgtgcctggcttttgtggaaagcaagttcaacatatcaaagataaatgaaaatgcagacggaagctttgactatggcctcttccagatcaacagccactactggtgcaacgattataagagttactcggaaaacctttgccacgtagactgtcaagatctgctgaatcccaaccttcttgcaggcatccactgcgcaaaaaggattgtgtccggagcacgggggatgaacaactgggtagaatggaggttgcactgttcaggccggccactcttctactggctgacaggatgccgcctgaga

SEQ ID NO: 4965 - DNA, 828 bp, Homo Sapiens
atggacagctcccgggaaccgactctggggcgcttggacgccgctggcttctggcaggtctggcagcgctttgatgcggatgaaaaaggttacatagaagagaaggaactcgatgctttctttctccacatgttgatgaaactgggtactgatgacacggtcatgaaagcaaatttgcacaaggtgaaacagcagtttatgactacccaagatgcctctaaagatggtcgcattcggatgaaagagcttgctggtatgttcttatctgaggatgaaaactttcttctgctctttcgccgggaaaacccactggacagcagcgtggagtttatgcagatttggcgcaaatatgacgctgacagcagtggctttatatcagctgctgagctccgcaacttcctccgagacctctttcttcaccacaaaaaggccatttctgaggctaaactggaagaatacactggcaccatgatgaagatttttgacagaaataaagatggtcggttggatctaaatgacttagcaaggattctggctcttcaggaaaacttccttctccaatttaaaatggatgcttgttctactgaagaaaggaaaagggactttgagaaaatctttgcctactatgatgttagtaaaacaggagccctggaaggcccagaagtggatgggtttgtcaaagacatgatggagcttgtccagcccagcatcagcggggtggaccttgataagttccgcgagattctcctgcgtcactgcgacgtgaacaaggatggaaaaattcagaagtctgagctggctttgtgtcttgggctgaaaatcaaccca

SEQ ID NO: 4966 - DNA, 834 bp, Homo Sapiens
accgacgccaccaacccacccgagggtccccaagacaggagctcccagcagaaaggccgcctgtccctgcagaatacagcggagatccagcactgtttggtcaacgctggcgatgtggggtgtggcgtgtttgaatgtttcgagaacaactcttgtgagattcggggcttacatgggatttgcatgacttttctgcacaacgctggaaaatttgatgcccagggcaagtcattcatcaaagacgccttgaaatgtaaggcccacgctctgcggcacaggttcggctgcataagccggaagtgcccggccatcagggaaatggtgtcccagttgcagcgggaatgctacctcaagcacgacctgtgcgcggctgcccaggagaacacccgggtgatagtggagatgatccatttcaaggacttgctgctgcacgaaccctacgtggacctcgtgaacttgctgctgacctgtggggaggaggtgaaggaggccatcacccacagcgtgcaggttcagtgtgagcagaactggggaagcctgtgctccatcttgagcttctgcacctcggccatccagaagcctcccacggcgccccccgagcgccagccccaggtggacagaaccaagctctccagggcccaccacggggaagcaggacatcacctcccagagcccagcagtagggagactggccgaggtgccaagggtgagcgaggtagcaagagccacccaaacgcccatgcccgaggcagagtcgggggccttggggctcagggaccttccggaagcagcgagtgggaagacgaacagtctgagtattctgatatccggagg

SEQ ID NO: 4967 - DNA, 681 bp, Homo Sapiens
cagctgtgcccgacaccatgtacctgcccctggccacctccccgatgcccgctgggagtacccctggtgctggatggctgtggctgctgccgggtatgtgcacggcggctgggggagccctgcgaccaactccacgtctgcgacgccagccagggcctggtctgccagcccggggcaggacccggtggacggggggccctgtgcctcttggcagaggacgacagcagctgtgaggtgaacggccgcctgtatcgggaaggggagaccttccagccccactgcagcatccgctgccgctgcgaggacggcggcttcacctgcgtgccgctgtgcagcgaggatgtgcggctgcccagctgggactgcccccaccccaggagggtcgaggtcctgggcaagtgctgccctgagtgggtgtgcggccaaggagggggactggggacccagccccttccagcccaaggaccccagttttctggccttgtctcttccctgccccctggtgtcccctgcccagaatggagcacggcctggggaccctgctcgaccacctgtgggctgggcatggccacccgggtgtccaaccagaaccgcttctgccgactggagacccagcgccgcctgtgcctgtccaggccctgcccaccctccaggggtcgcagtccacaaaacagtgccttc

SEQ ID NO: 4968 - DNA, 303 bp, Homo Sapiens
ctgatagcgaccccggagcaccgctgccgggtgccggacgccgcgaacctgagcagcgcctggcgcaaccacactgtcccactgcggctgcgggacggccgcgaggtgccccacagctgccgccgctaccggctcgccaccatcgccaacttctcggcgcttgggctggagccggggcgcgacgtggacctggggcagctggagcaggagagctgtccggatggctgggagttcagtcaggacgtctacctgtccaccattgtgaccgagtggaacctggtgtgtgaggacgactggaaggcc

SEQ ID NO: 4969 - DNA, 225 bp, Homo Sapiens
gaggctcccgtgcaggaagagaagctgtcagcaagcacctcaaatttgccatgctggctggtggaagagtttgtggtagcagaagagtgctctccatgctctaatttccgggctaaaactacccctgagtgtggtcccacaggatatgtagagaaaatcacatgcagctcatctaagagaaatgagttcaaaagctgccgctcagctttgatggaacaacgctta

SEQ ID NO: 4970 - DNA, 705 bp, Homo Sapiens
accttgaactcggttctcaattccaacgctatcaagaacctgcccccaccgctgggcggcgctgcggggcacccaggctctgcagtcagcgccgcgccgggaatcctgtacccgggcgggaataagtaccagaccattgacaactaccagccgtacccgtgcgcagaggacgaggagtgcggcactgatgagtactgcgctagtcccacccgcggaggggacgcaggcgtgcaaatctgtctcgcctgcaggaagcgccgaaaacgctgcatgcgtcacgctatgtgctgccccgggaattactgcaaaaatggaatatgtgtgtcttctgatcaaaatcatttccgaggagaaattgaggaaaccatcactgaaagctttggtaatgatcatagcaccttggatgggtattccagaagaaccaccttgtcttcaaaaatgtatcacaccaaaggacaagaaggttctgtttgtctccggtcatcagactgtgcctcaggattgtgttgtgctagacacttctggtccaagatctgtaaacctgtcctgaaagaaggtcaagtgtgtaccaagcataggagaaaaggctctcatggactagaaatattccagcgttgttactgtggagaaggtctgtcttgccggatacagaaagatcaccatcaagccagtaattcttctaggcttcacacttgtcagagacac

SEQ ID NO: 4971 - DNA, 312 bp, Homo Sapiens
ttctttatcggctgctccagccaccagattgcgggcatcacacaccagaccagtgcccaccctgggctggagctgtctccaagctgcatggaggcctgctcctgcccattggacggctttaaccctgtctgcgaccccagcactcgtgtggaatacatcacaccctgccacgcaggctgctcaagctgggtggtccaggatgctctggacaacagccaggttttctacaccaactgcagctgcgtggtggagggcaaccccgtgctggcaggatcctgcgactcaacgtgcagccatctggtggtgcccttc

SEQ ID NO: 4972 - DNA, 2463 bp, Homo Sapiens
gcgcgagttaacaagcacaagccctggctggagcccacctaccacggcatagtcacagagaacgacaacaccgtgctcctcgaccccccactgatcgcgctggataaagatgcgcctctgcgatttgcaggtgagatttgtggatttaaaattcacgggcagaatgtcccctttgatgcagtggtagtggataaatccactggtgagggagtcattcgctccaaagagaaactggactgtgagctgcagaaagactattcattcaccatccaggcctatgattgtgggaagggacctgatggcaccaacgtgaaaaagtctcataaagcaactgttcatattcaggtgaacgacgtgaatgagtacgcgcccgtgttcaaggagaagtcctacaaagccacggtcatcgaggggaagcagtacgacagcattttgagggtggaggccgtggatgccgactgctcccctcagttcagccagatttgcagctacgaaatcatcactccagacgtgccctttactgttgacaaagatggttatataaaaaacacagagaaattaaactacgggaaagaacatcaatataagctgaccgtcactgcctatgactgtgggaagaaaagagccacagaagatgttttggtgaagatcagcattaagccaacctgcacccctgggtggcaaggatggaacaacaggattgagtatgagccgggcaccggcgcgttggccgtctttccaaatatccacctggagacatgtgacgagccagtcgcctcagtacaggccacagtggagctagaaaccagccacatagggaaaggctgcgaccgagacacctactcagagaagtccctccaccggctctgtggtgcggccgcgggcactgccgagctgctgccatccccgagtggatccctcaactggaccatgggcctgcccaccgacaatggccacgacagcgaccaggtgtttgagttcaacggcacccaggcagtgaggatcccggatggcgtcgtgtcggtcagccccaaagagccgttcaccatctcggtgtggatgagacatgggccattcggcaggaagaaggagacaattctttgcagttctgataaaacagatatgaatcggcaccactactccctctatgtccacgggtgccggctgatcttcctcttccgtcaggatccttctgaggagaagaaatacagacctgcagagttccactggaagttgaatcaggtctgtgatgaggaatggcaccactacgtcctcaatgtagaattcccgagtgtgactctctatgcggatggcacgtcccacgagcccttctctgtgactgaggattacccgctccatccatccaagatagaaactcagctcgtggtgggggcttgctggcaagagttttcaggagttgaaaatgacaatgaaactgagcctgtgactgtggcctgtgcaggtggcgacctgcacatgacccagtttttccgaggcaatctggctggcttaactctccgttccgggaaactcgcggataagaaggtgatcgactgtctgtatacctgcaaggaggggctggacctgcaggtcctcgaagacagtggcagaggcgtgcagatccaagcacaccgcagccagttggtattgaccttggagggagaagacctcggggaattggataaggccatgcagcacatctcgtacctgaactcccggcagttccccacgcccggaattcgcagactcaaaatcaccagcacaatcaagtgttttaacgaggccacctgcatttcggtccccccggtagatggctacgtgatggttttacagcccgaggagcccaagatcagcctgagtggcgtccaccattttgcccgagcagcttctgaatttgaaagctcagaaggggtgttccttttccctgagcttcgcatcatcagcaccatcacgagagaagtggagcctgaaggggacggggctgaggaccccacagttcaagaatcactggtgtccgaggagatcgtgcacgacctggatacctgtgaggtcacggtggagggagaggagctgaaccacgagcaggagagcctggaggtggacatggcccgcctgcagcagaagggcattgaagtgagcagctctgaactgggcatgaccttcacaggcgtggacaccatggccagctacgaggaggttttgcacctgctgcgctatcggaactggcatgccaggtccttgcttgaccggaagtttaagctcatctgctcagagctgaatggccgctacatcagcaacgaatttaaggtggaggtgaatgtaatccacacggccaaccccatggaacacgccaaccacatggctgcccagccacagttcgtgcacccggaacaccgctcctttgttgacctgtcaggccacaacctggccaacccccacccgttcgcagtcgtccacagcact

SEQ ID NO: 4973 - DNA, 726 bp, Homo Sapiens
aaggaagtggtgcatgccacggaggggctggattgggaagacaaagatgctccagggacgttggtcggcaacgtggtgcactcaaggatcatcagtcccctgcgcctgtttgttaaacagtctccggtgcccaagcccggccccatggcgtatgcagacagcatggaaaacttttgggattggctggccaacatcacggagattcaggagccattggcaagaactaaacggaggccaatagtaaaaacaggaaaatttaagaaaatgtttggatggggtgactttcattccaacattaaaactgtcaaactcaatctcctcatcacagggaaaattgttgaccatggaaatggaaccttcagagtgtatttccgacataattcaacaggcctgggcaatgtttcagtgagcttggtaccaccctccaaggtggtggaatttgaagtttccccccagtctaccttggagaccaaggaatccaaatctttcaattgtcgcattgagtatgaaaaaacagatcgggcgaaaaagaccgccctgtgcaactttgacccatccaagatctgctaccaggagcagactcagagccatgtgtcttggttgtgctccaagcccttcaaggtcatttgcatttacattgccttttacagtgttgattataaactcgtgcaaaaggtgtgccctgactacaattaccatagtgagaccccatacttatcttctggc

SEQ ID NO: 4974 - DNA, 690 bp, Homo Sapiens
caggatgatggtcctcccggctcagaggaccctgagcgtgatgaccacgagggccagccccggccccgggtgcctcggaagcggggccacatctcacctaagtcacgccccatggccaattccactctcctagggctgctggccccgcctggggaggcttggggcattcttgggcagccccccaaccgcccgaaccacagccccccaccctcagccaaggtgaagaaaatctttggctggggcgacttctactccaacatcaagacggtggccctgaacctgctcgtcacagggaagattgtggaccatggcaatgggaccttcagcgtccacttccaacacaatgccacaggccagggaaacatctccatcagcctcgtgccccccagtaaagctgtagagttccaccaggaacagcagatcttcatcgaagccaaggcctccaaaatcttcaactgccggatggggtgggagaaggtagaacggggccgccggacctcgctttgcacccacgacccagccaagatctgctcccgagaccacgctcagagctcagccacctggagctgctcccagcccttcaaagtcgtctgtgtctacatcgccttctacagcacggactatcggctggtccagaaggtgtgcccagattacaactaccatagtgataccccctactacccatctggg

SEQ ID NO: 4975 - DNA, 855 bp, Homo Sapiens
cagataccagagtccggaaggccgcagtacctggggctgcgccccgccgcggccggagcgggtgcccccggccagcagctcccagagccaaggtcttcggacggcctaggcgtgggccgcgcctggagctgggcctggccgaccaaccacacgggggcgctggcccgggcaggggcagccggggcgttgcccgcgcagcgcaccaagaggaagccgtccatcaaggcggcgcgcgccaaaaagatcttcggctggggggacttctactttcgggtgcataccctcaagttttcgctgctggtgaccggcaagatcgtggaccatgtgaacggtaccttcagtgtgtatttccgccacaactcgtccagcctgggcaacctcagtgtcagcatcgtgccgccctccaagcgtgtcgagttcggaggagtctggctgcccgggcctgtcccccaccctctgcagtctacgctcgccctggagggggtgcttcctgggctggggcccccgctggggatggcagcagcagcggcggggccggggcttgggggctccctcgggggcgcactggcggggccgcttgggggcgcgttgggagtgcctggggccaaagagtcacgcgctttcaattgccacgtggagtatgagaagacaaaccgcgcgcgcaagcaccgaccgtgcctgtacgatccatcgcaggtgtgcttcaccgagcacacgcagagccaggccgcctggctctgtgccaagcccttcaaagtcatctgtatcttcgtctctttcctcagctttgactacaaactggtgcagaaggtgtgcccagactataacttccagagtgagcacccctacttcgga

SEQ ID NO: 4976 - DNA, 651 bp, Homo Sapiens
acagatacacatcatccccaggattctgctctgtatcatctcagcaagcagctattacagaaatatcataaagaagtgagacctgtttacaactggaccaaggccaccacagtctacctggacctgttcgtccatgctatattggatgtggatgcagagaatcaaatattaaagacaagtgtatggtaccaagaggtctggaatgatgaatttttatcctggaactccagcatgtttgatgagattagagagatctccctacctctaagtgccatctgggcccccgatatcatcatcaatgagtttgtggacattgaaagataccctgaccttccctatgtttatgtgaactcatctgggaccattgagaactataagcccatccaggtggtctctgcgtgcagtttagagacatatgcttttccatttgatgtccagaattgcagcctgaccttcaagagcattctgcatacagtggaagacgtagacctggcctttctgaggagcccagaagacattcagcatgacaaaaaggcgtttttgaatgacagtgagtgggaacttctatctgtgtcctccacatacagcatcctgcagagcagcgctggaggatttgcacagattcagtttaatgtggtgatgcgcaggcac

SEQ ID NO: 4977 - DNA, 1638 bp, Homo Sapiens
gcgcccgtggcgggcctgggctccgacgcggagctgcagatcgagcggcgcttcgtgcccgacgagtgcccgcgcaccgtgcgcagcggcgacttcgtgcgctaccactacgtggggacgttccccgacggccagaagttcgactccagctatgacagagactccactttcaatgtgtttgtgggaaaaggacagctgatcacagggatggaccaggctcttgttgggatgtgcgtaaacgagagacgtttcgtgaagattcccccaaagcttgcctacggaaatgaaggagtttctggtgtgatcccccccaattcagtgcttcattttgatgtacttctgatggatatttggaattctgaagaccaggttcagattcacacctatttcaagcccccgagttgccctcggaccatccaggtgtctgattttgtgaggtaccactacaacgggacgttcctggacggaactctgtttgattcgagtcacaatcgcatgaaaacatatgacacgtatgtgggaattggctggctgattcctggaatggataaagggctgctggggatgtgtgtgggtgagaagcgcatcatcaccattcctccttttctggcctatggagaggatggagatgggaaagacattcccggtcaggcatctctggtgtttgatgttgcattattggacctccataaccccaaggacagcatttccattgagaacaaggtagtacctgaaaactgtgagcggataagtcaaagtggggactttctcaggtatcattacaatggcacgcttctggatggcaccctctttgattccagctactctcggaaccgcacgtttgacacgtacattgggcagggctacgtgattcctgggatggatgaaggtctacttggtgtttgcattggagaaaagcgaaggattgtggtcccgcctcacctggggtatggagaggaaggaagagggaatatccccggctcggctgtgctggtgtttgacatccatgtgatcgacttccacaacccttcggactccatcagcatcacctcccactacaaaccccctgactgctcagtgctgagtaagaagggagattacctcaaatatcactacaatgcctcacttctggatgggaccctgctggactccacgtggaatttaggcaaaacttacaatattgttctgggatctgggcaagttgtgttggggatggacatgggtctcagagagatgtgcgttggcgagaaacggacagtgatcattccgcctcacctgggctatggggaagctggcgtggatggagaagtgcccggcagtgccgtattagtgtttgacattgagctgctggagctggtggctggccttcctgaggggtacatgttcatatggaatggtgaggtgtcacccaacctctttgaagaaattgacaaggatggcaacggagaagtcctcctggaagagttctcagagtacattcacgcccaggtggcatctggcaaagggaaactcgctcctggctttgatgctgagctgattgtgaagaatatgttcaccaaccaggaccggaatggagatgggaaggtcacagccgaggaatttaaactcaaagaccaggaagccaaacacgatgaactc

SEQ ID NO: 4978 - DNA, 993 bp, Homo Sapiens
actggaccattagatacaacacctgaaggaaggcctggagaagtgtcagatgcacctcagcgtaaacagttttgtcactggccctgcaaatgccctcagcagaagccccgttgccctcctggagtgagcctggtgagagatggctgtggatgctgtaaaatctgtgccaagcaaccaggggaaatctgcaatgaagctgacctctgtgacccacacaaagggctgtattgtgactactcagtagacaggcctaggtacgagactggagtgtgtgcataccttgtagctgttgggtgcgagttcaaccaggtacattatcataatggccaagtgtttcagcccaaccccttgttcagctgcctctgtgtgagtggggccattggatgcacacctctgttcataccaaagctggctggcagtcactgctctggagctaaaggtggaaagaagtctgatcagtcaaactgtagcctggaaccattactacagcagctttcaacaagctacaaaacaatgccagcttatagaaatctcccacttatttggaaaaaaaaatgtcttgtgcaagcaacaaaatggactccctgctccagaacatgtgggatgggaatatctaacagggtgaccaatgaaaacagcaactgtgaaatgagaaaagagaaaagactgtgttacattcagccttgcgacagcaatatattaaagacaataaagattcccaaaggaaaaacatgccaacctactttccaactctccaaagctgaaaaatttgtcttttctggatgctcaagtactcagagttacaaacccactttttgtggaatatgcttggataagagatgctgtatccctaataagtctaaaatgattactattcaatttgattgcccaaatgaggggtcatttaaatggaagatgctgtggattacatcttgtgtgtgtcagagaaactgcagagaacctggagatatattttctgagctcaagattctg

SEQ ID NO: 4979 - DNA, 387 bp, Homo Sapiens
gtggaggtggccacccattacctcgagatcataacccagcttatagtggagagcttccacttcaagaatggagaagatgccccagatcttctgaaagtcatcactaagcccttcacaaagctcattgtccagctggataaaaaagttatcagccaaattgcaatgaacgatgaaaaagcgaaaaacaagagtcttgtcaagatttggtgcaaaacttttaccaacaagacccagattaacgtcactgttccctcgactgctaactgcacctccccttccctctgttggacggatggcatccaaaactggaccatgaagaatgtgacctacaaggagaacatcgccaaatgccagcatatctttgtgaatttccacctcccggatctt

SEQ ID NO: 4980 - DNA, 564 bp, Homo Sapiens
atgttccaccaaatttgggcagctctgctctacttctatggtattatccttaactccatctaccagtgccctgagcacagtcaactgacaactctgggcgtggatgggaaggagttcccagaggtccacttgggccagtggtactttatcgcaggggcagctcccaccaaggaggagttggcaacttttgaccctgtggacaacattgtcttcaatatggctgctggctctgccccgatgcagctccaccttcgtgctaccatccgcatgaaagatgggctctgtgtgccccggaaatggatctaccacctgactgaagggagcacagatctcagaactgaaggccgccctgacatgaagactgagctcttttccagctcatgcccaggtggaatcatgctgaatgagacaggccagggttaccagcgctttctcctctacaatcgctcaccacatcctcccgaaaagtgtgtggaggaattcaagtccctgacttcctgcctggactccaaagccttcttattgactcctaggaatcaagaggcctgtgagctgtccaataac

SEQ ID NO: 4981 - DNA, 159 bp, Homo Sapiens
cagtggcagatgagctcctatgcgggtgacaacatcatcacggcccaggccatgtacaaggggctgtggatggactgcgtcacgcagagcacggggatgatgagctgcaaaatgtacgactcggtgctcgccctgtccgcggccttgcaggccactcga

SEQ ID NO: 4982 - DNA, 159 bp, Homo Sapiens
ctgtggaaggtgaccgccttcatcggcaacagcatcgtggtggcccaggtggtgtgggagggcctgtggatgtcctgcgtggtgcagagcacgggccagatgcagtgcaaggtgtacgactcactgctggctctgccgcaggacctgcaggccgcacgt

SEQ ID NO: 4983 - DNA, 1410 bp, Homo Sapiens
caggacactttcactgcagctgtttatgagcatgcagcgatattgcccaatgccaccctaacaccagtgtctcgtgaggaggctttggcattaatgaatcggaatctggacattttggaaggagcgatcacatcagcagcagatcagggtgcgcatattattgtgactccagaagatgctatttatggctggaacttcaacagggactctctctacccatatttggaggacatcccagaccctgaagtaaactggatcccctgtaataatcgtaacagatttggccagaccccagtacaagaaagactcagctgcctggccaagaacaactctatctatgttgtggcaaatattggggacaagaagccatgcgataccagtgatcctcagtgtccccctgatggccgttaccaatacaacactgatgtggtatttgattctcaaggaaaactggtggcacgctaccataagcaaaaccttttcatgggtgaaaatcaattcaatgtacccaaggagcctgagattgtgactttcaataccacctttggaagttttggcattttcacatgctttgatatactcttccatgatcctgctgttaccttggtgaaagatttccacgtggacaccatagtattcccaacagcttggatgaatgttttgccacatttgtcagctgttgaattccactcagcttgggctatgggcatgagggtcaatttccttgcatccaacatacattacccctcaaagaaaatgacaggaagtggcatctatgcacccaattcttcaagagcatttcattatgatatgaagacagaagagggaaaactcctcctctcgcaactggattcccacccatcccattctgcagtggtgaactggacttcctatgccagcagtatagaagcgctctcatcaggaaacaaggaatttaaaggcactgtctttttcgatgaattcacttttgtgaagctcacaggagttgcaggaaattatacagtttgtcagaaagatctctgctgtcatttaagctacaaaatgtctgagaacataccaaatgaagtgtacgctctaggggcatttgacggactgcacactgtggaagggcgctattatctacagatttgtaccctgttgaaatgtaaaacgactaatttaaacacttgcggtgactcagctgaaacagcttctaccaggtttgaaatgttctccctcagtggcactttcggaacccagtatgtctttcctgaggtgttgctgagtgaaaatcagcttgcacctggagaatttcaggtgtcaactgacggacgcttgtttagtctgaagccaacatccggacctgtcttaacagtaactctgtttgggaggttgtatgagaaggactgggcatcaaatgcttcatcaggc

SEQ ID NO: 4984 - DNA, 1413 bp, Homo Sapiens
caggacagttttatagctgcagtgtatgaacatgctgtcattttgccaaataaaacagaaacaccagtttctcaggaggatgccttgaatctcatgaacgagaatatagacattctggagacagcgatcaagcaggcagctgagcagggtgctcgaatcattgtgactccagaagatgcactttatggatggaaatttaccagggaaactgttttcccttatctggaggatatcccagaccctcaggtgaactggattccgtgtcaagacccccacagatttggtcacacaccagtacaagcaagactcagctgcctggccaaggacaactctatctatgtcttggcaaatttgggggacaaaaagccatgtaattcccgtgactccacatgtcctcctaatggctactttcaatacaataccaatgtggtgtataatacagaaggaaaactcgtggcacgttaccataagtaccacctgtactctgagcctcagtttaatgtccctgaaaagccggagttggtgactttcaacaccgcatttggaaggtttggcattttcacgtgctttgatatattcttctatgatcctggtgttaccctggtgaaagatttccatgtggacaccatactgtttcccacagcttggatgaacgttttgccccttttgacagctattgaattccattcagcttgggcaatgggaatgggagttaatcttcttgtggccaacacacatcatgtcagcctaaatatgacaggaagtggtatttatgcaccaaatggtcccaaagtgtatcattatgacatgaagacagagttgggaaaacttctcctttcagaggtggattcacatcccctatcctcgcttgcctacccaacagctgttaattggaatgcctacgccaccaccatcaaaccatttccagtacagaaaaacactttcaggggatttatttccagggatgggttcaacttcacagaactttttgaaaatgcaggaaaccttacagtctgtcaaaaggagctttgctgtcatttaagctacagaatgttacaaaaagaagagaatgaagtatacgttctaggagcttttacaggattacatggccgaaggagaagagagtactggcaggtctgcacaatgctgaagtgcaaaactactaatttgacaacttgtggacggccagtagaaactgcttctacaagatttgaaatgttctccctcagtggcacatttggaacagagtatgtttttcctgaagtgctacttaccgaaattcatctgtcacctggaaaatttgaggtgctgaaagatgggcgtttggtaaacaagaatggatcatctgggcctatactaacagtgtcactctttgggaggtggtacacaaaggactcactttacagctcatgt

SEQ ID NO: 4985 - DNA, 159 bp, Homo Sapiens
cactggcggaggacagcgcacgtgggcaccaacatcctcacggccgtgtcctacctgaaagggctctggatggagtgtgtgtggcacagcacaggcatctaccagtgccagatctaccgatccctgctggcgctgccccaagacctccaggctgcccgc

SEQ ID NO: 4986 - DNA, 1431 bp, Homo Sapiens
gccagcgtgcccctggcggccagcccggcgcgggcgctgcccggcggcgccgacaatgcttcggtcgcctcgggcgccgccgcgtccccgggcccgcagcggagcctgagcgcgctgcacggcgcgggcggttcagccgggccccccgcgctgcccggggcacccgcggccagcgcgcacccgctgccgcccgggcccctgttcagccgcttcctgtgcacgccgctggctgctgcctgcccgtcgggggcccagcagggggacgcggcgggcgctgcgccgggcgagcgcgaagagctgctgctgctgcagagcacggccgagcagctgcgccagacggcgctgcagcaggaggcgcgcatccgcgccgaccaggacaccatccgtgagctcaccggcaagctgggccgctgcgagagcggcctgccgcgcggcctccagggcgccgggccccgccgcgacaccatggccgacgggccctgggactcgcctgcgctcattctggagctggaggacgccgtgcgcgccctgcgggaccgcatcgaccgcctggagcaggagcttccagcccgtgtgaacctctcagctgccccagccccagtctctgctgtgcccaccggcctacactccaagatggaccagctggaggggcagctgctggcccaggtgctggcactggagaaggagcgtgtggccctcagccacagcagccgccggcagaggcaggaagtggaaaaggagttggacgtcctgcagggtcgtgtggctgagctggagcacgggtcctcagcctacagtcctccagatgccttcaagatcagcatccccatccgtaacaactacatgtacgcccgcgtgcggaaggctctgcccgagctctacgcattcaccgcctgcatgtggctgcggtccaggtccagcggcaccggccagggcacccccttctcctactcagtgcccgggcaggccaacgagattgtactgctagaggcgggccatgagcccatggagctgctgatcaacgacaaggtggcccagctgcccctgagcctgaaggacaatggctggcaccacatctgcatcgcctggaccacaagggatggcctatggtctgcctaccaggacggggagctgcagggctccggtgagaacctggctgcctggcaccccatcaagcctcatgggatccttatcttgggccaggagcaggataccctgggtggccggtttgatgccacccaggcctttgtcggtgacattgcccagtttaacctgtgggaccacgccctgacaccagcccaggtcctgggcattgccaactgcactgcgccactgctgggcaacgtccttccctgggaagacaagttggtggaggcctttgggggtgcaacaaaggctgccttcgatgtctgcaaggggagggccaaggca

SEQ ID NO: 4987 - DNA, 285 bp, Homo Sapiens
gccgtgcccatggactcaggcccaagctgtctggctgtgcccaatgccaccgggcagacaggcctccctggagactctggcctgctgcaggactcctctctacctcccattccaaggaccaatgaggaccaaagggagccaatcttgtccactgctaagaaaaccaagccccatcccagatctggagacccctcagcccctcctcggctggccctgagctctgccctccctgggccccctctgcccgctcgggggcatgcactgctgcgctggaccgcactgctg

SEQ ID NO: 4988 - DNA, 159 bp, Homo Sapiens
aactccagggacctgctgggctgcttggcacaggagcacaacatcagcgcgagccaggtcaacgcgtgtcacgtggcggagtcggccgtcaactacagcctgggcgatgagcagggcttctgtggcagcccctggcccaactgcaacttccccgagtac

SEQ ID NO: 4989 - DNA, 426 bp, Homo Sapiens
ggcggcggtgggaaagcctggcccacacacgtggtctgtagcgacagcggcttggaagtgctctaccagagttgcgatccattacaagattttggcttttctgttgaaaagtgttccaagcaattaaaatcaaatatcaacattagatttggaattattctgagagaggacatcaaagagctttttcttgacctagctctcatgtctcaaggctcatctgttttgaatttctcctatcccatctgtgaggcggctctgcccaagttttctttctgtggaagaaggaaaggagagcagatttactatgctgggcctgtcaataatcctgaatttactattcctcagggagaataccaggttttgctggaactgtacactgaaaaacggtccaccgtggcctgtgccaatgctactatcatgtgctcc

SEQ ID NO: 4990 - DNA, 750 bp, Homo Sapiens
acacggcaccaggatggccgccagaatcagagttctctttcccccgtactcctgccaaggaatcaaagagagcttcccacaggcaaccatgaggaagctgaggagaagccagatctgtttgtcgcagtgccacaccttgtaggcaccagccctgcaggggaaggccagaggcagagagagaagatgctgtccagatttggcaggttctggaagaagcctgagagagaaatgcatccatccagggactcagatagtgagcccttcccacctgggacccagtctctcatccagccgatagatggaatgaaaatggagaaatctcctcttcgggaagaagccaagaaattctggcaccacttcatgttcagaaaaactccggcttctcagggggtcatcttgcccatcaaaagccatgaagtacattgggagacctgcaggacagtgcccttcagccagactataacccacgaaggctgtgagaaagtagttgttcagaacaacctttgctttgggaaatgcgggtctgttcattttcctggagccgcgcagcactcccatacctcctgctctcactgtttgcctgccaagttcaccacgatgcacttgccactgaactgcactgaactttcctccgtgatcaaggtggtgatgctggtggaggagtgccagtgcaaggtgaagacggagcatgaagatggacacatcctacatgctggctcccaggattcctttatcccaggagtttcagct

SEQ ID NO: 4991 - DNA, 159 bp, Homo Sapiens
cagtggaggatttactcctatgccggcgacaacatcgtgaccgcccaggccatgtacgaggggctgtggatgtcctgcgtgtcgcagagcaccgggcagatccagtgcaaagtctttgactccttgctgaatctgagcagcacattgcaagcaacccgt

SEQ ID NO: 4992 - DNA, 438 bp, Homo Sapiens
cataatgggcttggaaagggttttggagatcatattcattggaggacactggaagatgggaagaaagaagcagctgccagtggactgcccctgatggtgattattcataaatcctggtgtggagcttgcaaagctctaaagcccaaatttgcagaatctacggaaatttcagaactctcccataattttgttatggtaaatcttgaggatgaagaggaacccaaagatgaagatttcagccctgacgggggttatattccacgaatcctttttctggatcccagtggcaaggtgcatcctgaaatcatcaatgagaatggaaaccccagctacaagtatttttatgtcagtgccgagcaagttgttcaggggatgaaggaagctcaggaaaggctgacgggtgatgccttcagaaagaaacatcttgaagatgaattg

SEQ ID NO: 4993 - DNA, 1302 bp, Homo Sapiens
cagactctcttccagaacccagaagagggctggcagctgtacacctcagcccaggcccctgacgggaaatgcatctgcacggccgtgatcccagcgcagagtacctgctctcgagatggcaggagtcgggagctgcggcaactgatggagaaggtccagaacgtctcccagtccatggaggtccttgagttgcggacgtatcgcgacctccagtatgtacgcggcatggagaccctcatgcggagcctggatgcgcggctccgggcagctgatgggtccctctcggccaagagcttccaggagctgaaggacaggatgacggaactgttgcccctgagctcggtcctggagcagtacaaggcagacacgcggaccattgtacgcttgcgggaggaggtgaggaatctctccggcagtctggcggccattcaggaggagatgggtgcctacgggtatgaggacctgcagcaacgggtgatggccctggaggcccggctccacgcctgcgcccagaagctgggctgtgggaagctgaccggggtcagtaaccccatcaccgttcgggccatggggtcccgcttcggctcctggatgactgacacgatggcccccagtgcggatagccgggtctggtacatggatggctattacaaaggccgccgggtcctggagttccgtaccctgggagacttcatcaaaggccagaactttatccagcacctgctgccccagccgtgggcgggcacgggccacgtggtgtacaacggctccctgttctataacaagtaccagagcaacgtggtggtcaaataccacttccgctcgcgctctgtgctggtgcagaggagcctcccgggcgccggttacaacaacaccttcccctactcctggggcggcttctccgacatggacttcatggtggacgagagcgggctctgggctgtgtacaccaccaaccagaacgcgggcaacatcgtggtcagccggctggacccgcacaccctcgaggtcatgcggtcctgggacaccggctaccccaagcgcagcgctggcgaggccttcatgatctgcggtgtgctctacgtgaccaactcccacctggctggggccaaggtctacttcgcctattttaccaacacgtccagttacgagtacacggacgtgcccttccacaaccagtattcccacatctcgatgctggattacaacccccgggagcgcgccctctatacctggaacaacggccaccaggtgctctacaatgtcaccctgtttcacgtcatcagcacctctggggacccc

SEQ ID NO: 4994 - DNA, 336 bp, Homo Sapiens
cctggtctgactgattggttatttcccaggagatgtcccaaaatcagagaagaatgtgaattccaagaaagggatgtgtgtacaaaggacagacaatgccaggacaacaagaagtgttgtgtcttcagctgcggaaaaaaatgtttagatctcaaacaagatgtatgcgaaatgccaaaagaaactggcccctgcctggcttattttcttcattggtggtatgacaagaaagataatacttgctccatgtttgtctatggtggctgccagggaaacaataacaacttccaatccaaagccaactgcctgaacacctgcaagaataaacgctttccc

SEQ ID NO: 4995 - DNA, 207 bp, Homo Sapiens
gtggtctgccaagctcttggttctgaaatcacaggcttcttattagctggaaaacctgtgttcaagttccaacttgccaaatttaaggcacctctggaagctgttgcagccaagatggaagtgaagaaatgcgtggatacgatggcctatgagaaaagagtgctaattacaaaaacattgggaaaaatagcagagaaatgtgatcgc

SEQ ID NO: 4996 - DNA, 207 bp, Homo Sapiens
gagttctgcccagctcttgtttctgagctgttagacttcttcttcattagtgaacctctgttcaagttaagtcttgccaaatttgatgcccctccggaagctgttgcagccaagttaggagtgaagagatgcacggatcagatgtcccttcagaaacgaagcctcattgcggaagtcctggtgaaaatattgaagaaatgtagtgtg

SEQ ID NO: 4997 - DNA, 465 bp, Homo Sapiens
agagataccacagtcaaacctggagccaaaaaggacacaaaggactctcgacccaaactgccccagaccctctccagaggttggggtgaccaactcatctggactcagacatatgaagaagctctatataaatccaagacaagcaacaaacccttgatgattattcatcacttggatgagtgcccacacagtcaagctttaaagaaagtgtttgctgaaaataaagaaatccagaaattggcagagcagtttgtcctcctcaatctggtttatgaaacaactgacaaacacctttctcctgatggccagtatgtccccaggattatgtttgttgacccatctctgacagttagagccgatatcactggaagatattcaaaccgtctctatgcttacgaacctgcagatacagctctgttgcttgacaacatgaagaaagctctcaagttgctgaagactgaattg

SEQ ID NO: 4998 - DNA, 1059 bp, Homo Sapiens
gcggcggcgcaggaggcggacggggcccgcagcgccgtggtggcggccgggggaggcagctccggtcaggtgaccagcaatggcagcatcgggagggacccgccagcggagacccagcctcagaacccaccggcccagccggcacccaatgcctggcaggtcatcaaaggtgtgctgtttaggatcttcatcatctgggccatcagcagttggttccgccgagggccggcccctcaggaccaggcgggccccggaggagccccacgcgtcgccagccgcaacctgttccccaaagacactttaatgaacctgcatgtgtacatctcagagcacgagcactttacagacttcaacgccacgtcggcactcttctgggaacagcacgatcttgtgtatggcgactggactagcggcgagaactcagacggctgctacgagcactttgctgagctcgatatcccacagagcgtccagcagaacggctccatctacatccacgtttacttcaccaagagtggcttccacccagacccccggcagaaggccctgtaccgccggcttgccacagtccacatgtcccggatgatcaacaaatacaagcgcagacgatttcagaaaaccaagaacctgctgacaggagagacagaagcggacccagaaatgatcaagagggctgaggactatgggcctgtggaggtgatctcccattggcaccccaacatcaccatcaacatcgtggacgaccacacgccgtgggtgaagggcagtgtgccccctcccctggatcaatatgtgaagttcgacgccgtgagcggtgactactatcccatcatctacttcaatgactactggaacctgcagaaggactactaccccatcaacgagagcctggccagcctgccgctccgcgtctccttctgcccgctctcgctttggcgctggcagctctatgctgcccagagcaccaagtcgccctggaacttcctgggtgatgagttgtacgagcagtcagatgaggagcaggactcggtgaaggtggccctgctggagaccaacccc

SEQ ID NO: 4999 - DNA, 1071 bp, Homo Sapiens
aagcccatcttcgtacctctctcgaactacagggatgtgcagtattttggggaaattgggctgggaacgcctccacaaaacttcactgttgcctttgacactggctcctccaatctctgggtcccgtccaggagatgccacttcttcagtgtgccctgctggttacaccaccgatttgatcccaaagcctctagctccttccaggccaatgggaccaagtttgccattcaatatggaactgggcgggtagatggaatcctgagcgaggacaagctgactattggtggaatcaagggtgcatcagtgattttcggggaggctctctgggagcccagcctggtcttcgcttttgcccattttgatgggatattgggcctcggttttcccattctgtctgtggaaggagttcggcccccgatggatgtactggtggagcaggggctattggataagcctgtcttctccttttacctcaacagggaccctgaagagcctgatggaggagagctggtcctggggggctcggacccggcacactacatcccacccctcaccttcgtgccagtcacggtccccgcctactggcagatccacatggagcgtgtgaaggtgggcccagggctgactctctgtgccaagggctgtgctgccatcctggatacgggcacgtccctcatcacaggacccactgaggagatccgggccctgcatgcagccattgggggaatccccttgctggctggggagtacatcatcctgtgctcggaaatcccaaagctccccgcagtctccttccttcttgggggggtctggtttaacctcacggcccatgattacgtcatccagactactcgaaatggcgtccgcctctgcttgtccggtttccaggccctggatgtccctccgcctgcagggcccttctggatcctcggtgacgtcttcttggggacgtatgtggccgtcttcgaccgcggggacatgaagagcagcgcccgggtgggcctggcgcgcgctcgcactcgcggagcggacctcggatggggagagactgcgcaggcgcagttccccggg

SEQ ID NO: 5000 - DNA, 990 bp, Homo Sapiens
atcaagtggctggcgctgtccaagacaccatcggccctggcactgaaccagacgcaacactgcaagcagctggagggtctggtgtctgcacaggtgcagctgtgccgcagcaacctggagctcatgcacacggtggtgcacgccgcccgcgaggtcatgaaggcctgtcgccgggcctttgccgacatgcgctggaactgctcctccattgagctcgcccccaactatttgcttgacctggagagagggacccgggagtcggccttcgtgtatgcgctgtcggccgccgccatcagccacgccatcgcccgggcctgcacctccggcgacctgcccggctgctcctgcggccccgtcccaggtgagccacccgggcccgggaaccgctggggaggatgtgcggacaacctcagctacgggctcctcatgggggccaagttttccgatgctcctatgaaggtgaaaaaaacaggatcccaagccaataaactgatgcgtctacacaacagtgaagtggggagacaggctctgcgcgcctctctggaaatgaagtgtaagtgccatggggtgtctggctcctgctccatccgcacctgctggaaggggctgcaggagctgcaggatgtggctgctgacctcaagacccgatacctgtcggccaccaaggtagtgcaccgacccatgggcacccgcaagcacctggtgcccaaggacctggatatccggcctgtgaaggactcggaactcgtctatctgcagagctcacctgacttcagcatgaagaatgagaaggtgggctcccacgggacacaagacaggcagtgcaacaagacatccaacggaagcgacagctgcgaccttatgtgctgcgggcgtggctacaacccctacacagaccgcgtggtcgagcggtgccactgtaagtaccactggtgctgctacgtcacctgccgcaggtgtgagcgtaccgtggagcgctatgtctgcaag

SEQ ID NO: 5001 - DNA, 3138 bp, Homo Sapiens
aaagaaaagcattattacattggaattattgaaacgacttgggattatgcctctgaccatggggaaaagaaacttatttctgttgacacggaacattccaatatctatcttcaaaatggcccagatagaattgggagactatataagaaggccctttatcttcagtacacagatgaaacctttaggacaactatagaaaaaccggtctggcttgggtttttaggccctattatcaaagctgaaactggagataaagtttatgtacacttaaaaaaccttgcctctaggccctacacctttcattcacatggaataacttactataaggaacatgagggggccatctaccctgataacaccacagattttcaaagagcagatgacaaagtatatccaggagagcagtatacatacatgttgcttgccactgaagaacaaagtcctggggaaggagatggcaattgtgtgactaggatttaccattcccacattgatgctccaaaagatattgcctcaggactcatcggacctttaataatctgtaaaaaagattctctagataaagaaaaagaaaaacatattgaccgagaatttgtggtgatgttttctgtggtggatgaaaatttcagctggtacctagaagacaacattaaaacctactgctcagaaccagagaaagttgacaaagacaacgaagacttccaggagagtaacagaatgtattctgtgaatggatacacttttggaagtctcccaggactctccatgtgtgctgaagacagagtaaaatggtacctttttggtatgggtaatgaagttgatgtgcacgcagctttctttcacgggcaagcactgactaacaagaactaccgtattgacacaatcaacctctttcctgctaccctgtttgatgcttatatggtggcccagaaccctggagaatggatgctcagctgtcagaatctaaaccatctgaaagccggtttgcaagcctttttccaggtccaggagtgtaacaagtcttcatcaaaggataatatccgtgggaagcatgttagacactactacattgccgctgaggaaatcatctggaactatgctccctctggtatagacatcttcactaaagaaaacttaacagcacctggaagtgactcagcggtgttttttgaacaaggtaccacaagaattggaggctcttataaaaagctggtttatcgtgagtacacagatgcctccttcacaaatcgaaaggagagaggccctgaagaagagcatcttggcatcctgggtcctgtcatttgggcagaggtgggagacaccatcagagtaaccttccataacaaaggagcatatcccctcagtattgagccgattggggtgagattcaataagaacaacgagggcacatactattccccaaattacaacccccagagcagaagtgtgcctccttcagcctcccatgtggcacccacagaaacattcacctatgaatggactgtccccaaagaagtaggacccactaatgcagatcctgtgtgtctagctaagatgtattattctgctgtggatcccactaaagatatattcactgggcttattgggccaatgaaaatatgcaagaaaggaagtttacatgcaaatgggagacagaaagatgtagacaaggaattctatttgtttcctacagtatttgatgagaatgagagtttactcctggaagataatattagaatgtttacaactgcacctgatcaggtggataaggaagatgaagactttcaggaatctaataaaatgcactccatgaatggattcatgtatgggaatcagccgggtctcactatgtgcaaaggagattcggtcgtgtggtacttattcagcgccggaaatgaggccgatgtacatggaatatacttttcaggaaacacatatctgtggagaggagaacggagagacacagcaaacctcttccctcaaacaagtcttacgctccacatgtggcctgacacagaggggacttttaatgttgaatgccttacaactgatcattacacaggcggcatgaagcaaaaatatactgtgaaccaatgcaggcggcagtctgaggattccaccttctacctgggagagaggacatactatatcgcagcagtggaggtggaatgggattattccccacaaagggagtgggaaaaggagctgcatcatttacaagagcagaatgtttcaaatgcatttttagataagggagagttttacataggctcaaagtacaagaaagttgtgtatcggcagtatactgatagcacattccgtgttccagtggagagaaaagctgaagaagaacatctgggaattctaggtccacaacttcatgcagatgttggagacaaagtcaaaattatctttaaaaacatggccacaaggccctactcaatacatgcccatggggtacaaacagagagttctacagttactccaacattaccaggtgaaactctcacttacgtatggaaaatcccagaaagatctggagctggaacagaggattctgcttgtattccatgggcttattattcaactgtggatcaagttaaggacctctacagtggattaattggccccctgattgtttgtcgaagaccttacttgaaagtattcaatcccagaaggaaactggaatttgcccttctgtttctagtttttgatgagaatgaatcttggtacttagatgacaacatcaaaacatactctgatcaccccgagaaagtaaacaaagatgatgaggaattcatagaaagcaataaaatgcatgctattaatggaagaatgtttggaaacctacaaggcctcacaatgcacgtgggagatgaagtcaactggtatctgatgggaatgggcaatgaaatagacttacacactgtacattttcacggccatagcttccaatacaagcacaggggagtttatagttctgatgtctttgacattttccctggaacataccaaaccctagaaatgtttccaagaacacctggaatttggttactccactgccatgtgaccgaccacattcatgctggaatggaaaccacttacaccgttctacaaaatgaagacaccaaatctggc

SEQ ID NO: 5002 - DNA, 369 bp, Homo Sapiens
aagcaattcacaaaatgtgagctgtcccagctgctgaaagacatagatggttatggaggcatcgctttgcctgaattgatctgtaccatgtttcacaccagtggttatgacacacaagccatagttgaaaacaatgaaagcacggaatatggactcttccagatcagtaataagctttggtgcaagagcagccaggtccctcagtcaaggaacatctgtgacatctcctgtgacaagttcctggatgatgacattactgatgacataatgtgtgccaagaagatcctggatattaaaggaattgactactggttggcccataaagccctctgcactgagaagctggaacagtggctttgtgagaagttg

SEQ ID NO: 5003 - DNA, 1737 bp, Homo Sapiens
gccaacaccttcttggaggaggtgcgcaagggcaacctggagcgagagtgcgtggaggagacgtgcagctacgaggaggccttcgaggctctggagtcctccacggctacggatgtgttctgggccaagtacacagcttgtgagacagcgaggacgcctcgagataagcttgctgcatgtctggaaggtaactgtgctgagggtctgggtacgaactaccgagggcatgtgaacatcacccggtcaggcattgagtgccagctatggaggagtcgctacccacataagcctgaaatcaactccactacccatcctggggccgacctacaggagaatttctgccgcaaccccgacagcagcaccacgggaccctggtgctacactacagaccccaccgtgaggaggcaggaatgcagcatccctgtctgtggccaggatcaagtcactgtagcgatgactccacgctccgaaggctccagtgtgaatctgtcacctccattggagcagtgtgtccctgatcgggggcagcagtaccaggggcgcctggcggtgaccacacatgggctcccctgcctggcctgggccagcgcacaggccaaggccctgagcaagcaccaggacttcaactcagctgtgcagctggtggagaacttctgccgcaacccagacggggatgaggagggcgcgtggtgctatgtggccgggaagcctggcgactttgggtactgcgacctcaactattgtgaggaggccgtggaggaggagacaggagatgggctggatgaggactcagacagggccatcgaagggcgtaccgccaccagtgagtaccagactttcttcaatccgaggacctttggctcgggagaggcagactgtgggctgcgacctctgttcgagaagaagtcgctggaggacaaaaccgaaagagagctcctggaatcctacatcgacgggcgcattgtggagggctcggatgcagagatcggcatgtcaccttggcaggtgatgcttttccggaagagtccccaggagctgctgtgtggggccagcctcatcagtgaccgctgggtcctcaccgccgcccactgcctcctgtacccgccctgggacaagaacttcaccgagaatgaccttctggtgcgcattggcaagcactcccgcaccaggtacgagcgaaacattgaaaagatatccatgttggaaaagatctacatccaccccaggtacaactggcgggagaacctggaccgggacattgccctgatgaagctgaagaagcctgttgccttcagtgactacattcaccctgtgtgtctgcccgacagggagacggcagccagcttgctccaggctggatacaaggggcgggtgacaggctggggcaacctgaaggagacgtggacagccaacgttggtaaggggcagcccagtgtcctgcaggtggtgaacctgcccattgtggagcggccggtctgcaaggactccacccggatccgcatcactgacaacatgttctgtgctggttacaagcctgatgaagggaaacgaggggatgcctgtgaaggtgacagtgggggaccctttgtcatgaagagcccctttaacaaccgctggtatcaaatgggcatcgtctcatggggtgaaggctgtgaccgggatgggaaatatggcttctacacacatgtgttccgcctgaagaagtggatacagaaggtcattgatcagtttggagag

SEQ ID NO: 5004 - DNA, 702 bp, Homo Sapiens
actccatggtctttggcctggccccagggatcctgctctctggagggggtagagatcaaaggcggctccttccgacttctccaagagggccaggcactggagtacgtgtgtccttctggcttctacccgtaccctgtgcagacacgtacctgcagatctacggggtcctggagcaccctgaagactcaagaccaaaagactgtcaggaaggcagagtgcagagcaatccactgtccaagaccacacgacttcgagaacggggaatactggccccggtctccctactacaatgtgagtgatgagatctctttccactgctatgacggttacactctccggggctctgccaatcgcacctgccaagtgaatggccggtggagtgggcagacagcgatctgtgacaacggagcggggtactgctccaacccgggcatccccattggcacaaggaaggtgggcagccagtaccgccttgaagacagcgtcacctaccactgcagccgggggcttaccctgcgtggctcccagcggcgaacgtgtcaggaaggtggctcttggagcgggacggagccttcctgccaagactccttcatgtacgacacccctcaagaggtggccgaagctttcctgtcttccctgacagagaccatagaaggagtcgatgctgaggatgggcacggcccaggggaacaacagaagcgg

SEQ ID NO: 5005 - DNA, 1020 bp, Homo Sapiens
ctgacacttggcaacaccacctcctccgtgatcctcaccaactacatggacacccagtactatggcgagattggcatcggcaccccaccccagaccttcaaagtcgtctttgacactggttcgtccaatgtttgggtgccctcctccaagtgcagccgtctctacactgcctgtgtgtatcacaagctcttcgatgcttcggattcctccagctacaagcacaatggaacagaactcaccctccgctattcaacagggacagtcagtggctttctcagccaggacatcatcaccgtgggtggaatcacggtgacacagatgtttggagaggtcacggagatgcccgccttacccttcatgctggccgagtttgatggggttgtgggcatgggcttcattgaacaggccattggcagggtcacccctatcttcgacaacatcatctcccaaggggtgctaaaagaggacgtcttctctttctactacaacagagattccgagaattcccaatcgctgggaggacagattgtgctgggaggcagcgacccccagcattacgaagggaatttccactatatcaacctcatcaagactggtgtctggcagattcaaatgaagggggtgtctgtggggtcatccaccttgctctgtgaagacggctgcctggcattggtagacaccggtgcatcctacatctcaggttctaccagctccatagagaagctcatggaggccttgggagccaagaagaggctgtttgattatgtcgtgaagtgtaacgagggccctacactccccgacatctctttccacctgggaggcaaagaatacacgctcaccagcgcggactatgtatttcaggaatcctacagtagtaaaaagctgtgcacactggccatccacgccatggatatcccgccacccactggacccacctgggccctgggggccaccttcatccgaaagttctacacagagtttgatcggcgtaacaaccgcattggcttcgccttggcccgc

SEQ ID NO: 5006 - DNA, 168 bp, Homo Sapiens
gactccctgggaagagaggccaaatgttacaatgaacttaatggatgcaccaagatatatgaccctgtctgtgggactgatggaaatacttatcccaatgaatgcgtgttatgttttgaaaatcggaaacgccagacttctatcctcattcaaaaatctgggccttgc

SEQ ID NO: 5007 - DNA, 1182 bp, Homo Sapiens
gaggatccccagggagatgctgcccagaagacagatacatcccaccatgatcaggatcacccaaccttcaacaagatcacccccaacctggctgagttcgccttcagcctataccgccagctggcacaccagtccaacagcaccaatatcttcttctccccagtgagcatcgctacagcctttgcaatgctctccctggggaccaaggctgacactcacgatgaaatcctggagggcctgaatttcaacctcacggagattccggaggctcagatccatgaaggcttccaggaactcctccgtaccctcaaccagccagacagccagctccagctgaccaccggcaatggcttgttcctcagcgagggcctgaagctagtggataagtttttggaggatgttaaaaagttgtaccactcagaagccttcactgtcaacttcggggacaccgaagaggccaagaaacagatcaacgattacgtggagaagggtactcaagggaaaattgtggatttggtcaaggagcttgacagagacacagtttttgctctggtgaattacatcttctttaaaggcaaatgggagagaccctttgaagtcaaggacaccgaggaagaggacttccacgtggaccaggtgaccaccgtgaaggtgcctatgatgaagcgtttaggcatgtttaacatccagcactgtaagaagctgtccagctgggtgctgctgatgaaatacctgggcaatgccaccgccatcttcttcctgcctgatgaggggaaactacagcacctggaaaatgaactcacccacgatatcatcaccaagttcctggaaaatgaagacagaaggtctgccagcttacatttacccaaactgtccattactggaacctatgatctgaagagcgtcctgggtcaactgggcatcactaaggtcttcagcaatggggctgacctctccggggtcacagaggaggcacccctgaagctctccaaggccgtgcataaggctgtgctgaccatcgacgagaaagggactgaagctgctggggccatgtttttagaggccatacccatgtctatcccccccgaggtcaagttcaacaaaccctttgtcttcttaatgattgaccaaaataccaagtctcccctcttcatgggaaaagtggtgaatcccacccaaaaa

SEQ ID NO: 5008 - DNA, 1194 bp, Homo Sapiens
aacagcccacttgacgaggagaatctgacccaggagaaccaagaccgagggacacacgtggacctcggattagcctccgccaacgtggacttcgctttcagcctgtacaagcagttagtcctgaaggcccctgataagaatgtcatcttctccccactgagcatctccaccgccttggccttcctgtctctgggggcccataataccaccctgacagagattctcaaaggcctcaagttcaacctcacggagacttctgaggcagaaattcaccagagcttccagcacctcctgcgcaccctcaatcagtccagcgatgagctgcagctgagtatgggaaatgccatgtttgtcaaagagcaactcagtctgctggacaggttcacggaggatgccaagaggctgtatggctccgaggcctttgccactgactttcaggactcagctgcagctaagaagctcatcaacgactacgtgaagaatggaactagggggaaaatcacagatctgatcaaggaccttgactcgcagacaatgatggtcctggtgaattacatcttctttaaagccaaatgggagatgccctttgacccccaagatactcatcagtcaaggttctacttgagcaagaaaaagtgggtaatggtgcccatgatgagtttgcatcacctgactataccttacttccgggacgaggagctgtcctgcaccgtggtggagctgaagtacacaggcaatgccagcgcactcttcatcctccctgatcaagacaagatggaggaagtggaagccatgctgctcccagagaccctgaagcggtggagagactctctggagttcagagagataggtgagctctacctgccaaagttttccatctcgagggactataacctgaacgacatacttctccagctgggcattgaggaagccttcaccagcaaggctgacctgtcagggatcacaggggccaggaacctagcagtctcccaggtggtccataaggctgtgcttgatgtatttgaggagggcacagaagcatctgctgccacagcagtcaaaatcaccctcctttctgcattagtggagacaaggaccattgtgcgtttcaacaggcccttcctgatgatcattgtccctacagacacccagaacatcttcttcatgagcaaagtcaccaatcccaagcaagcc

SEQ ID NO: 5009 - DNA, 1356 bp, Homo Sapiens
gaccgggtgtacatacaccccttccacctcgtcatccacaatgagagtacctgtgagcagctggcaaaggccaatgccgggaagcccaaagaccccaccttcatacctgctccaattcaggccaagacatcccctgtggatgaaaaggccctacaggaccagctggtgctagtcgctgcaaaacttgacaccgaagacaagttgagggccgcaatggtcgggatgctggccaacttcttgggcttccgtatatatggcatgcacagtgagctatggggcgtggtccatggggccaccgtcctctccccaacggctgtctttggcaccctggcctctctctatctgggagccttggaccacacagctgacaggctacaggcaatcctgggtgttccttggaaggacaagaactgcacctcccggctggatgcgcacaaggtcctgtctgccctgcaggctgtacagggcctgctagtggcccagggcagggctgatagccaggcccagctgctgctgtccacggtggtgggcgtgttcacagccccaggcctgcacctgaagcagccgtttgtgcagggcctggctctctatacccctgtggtcctcccacgctctctggacttcacagaactggatgttgctgctgagaagattgacaggttcatgcaggctgtgacaggatggaagactggctgctccctgacgggagccagtgtggacagcaccctggctttcaacacctacgtccacttccaagggaagatgaagggcttctccctgctggccgagccccaggagttctgggtggacaacagcacctcagtgtctgttcccatgctctctggcatgggcaccttccagcactggagtgacatccaggacaacttctcggtgactcaagtgtccttcactgagagcgcctgcctgctgctgatccagcctcactatgcctctgacctggacaaggtggagggtctcactttccagcaaaactccctcaactggatgaagaaactgtctccccggaccatccacctgaccatgccccaactggtgctgcaaggatcttatgacctgcaggacctgctcgcccaggctgagctgcccgccattctgcacaccgagctgaacctgcaaaaattgagcaatgaccgcatcagggtgggggaggtgctgaacagcattttttttgagcttgaagcggatgagagagagcccacagagtctacccaacagcttaacaagcctgaggtcttggaggtgaccctgaaccgcccattcctgtttgctgtgtatgatcaaagcgccactgccctgcacttcctgggccgcgtggccaacccgctgagcacagca

SEQ ID NO: 5010 - DNA, 552 bp, Homo Sapiens
tgcacctgtgtcccaccccacccacagacggccttctgcaattccgacctcgtcatcagggccaagttcgtggggacaccagaagtcaaccagaccaccttataccagcgttatgagatcaagatgaccaagatgtataaagggttccaagccttaggggatgccgctgacatccggttcgtctacacccccgccatggagagtgtctgcggatacttccacaggtcccacaaccgcagcgaggagtttctcattgctggaaaactgcaggatggactcttgcacatcactacctgcagtttcgtggctccctggaacagcctgagcttagctcagcgccggggcttcaccaagacctacactgttggctgtgaggaatgcacagtgtttccctgtttatccatcccctgcaaactgcagagtggcactcattgcttgtggacggaccagctcctccaaggctctgaaaagggcttccagtcccgtcaccttgcctgcctgcctcgggagccagggctgtgcacctggcagtccctgcggtcccagatagcc

SEQ ID NO: 5011 - DNA, 360 bp, Homo Sapiens
tccagtcccggcaagccgccgcgcctggtgggaggccccatggacgccagcgtggaggaggagggtgtgcggcgtgcactggactttgccgtcggcgagtacaacaaagccagcaacgacatgtaccacagccgcgcgctgcaggtggtgcgcgcccgcaagcagatcgtagctggggtgaactacttcttggacgtggagctgggccgaaccacgtgtaccaagacccagcccaacttggacaactgccccttccatgaccagccacatctgaaaaggaaagcattctgctctttccagatctacgctgtgccttggcagggcacaatgaccttgtcgaaatccacctgtcaggacgcc

SEQ ID NO: 5012 - DNA, 363 bp, Homo Sapiens
tcgagctccaaggaggagaataggataatcccaggtggcatctatgatgcagacctcaatgatgagtgggtacagcgtgcccttcacttcgccatcagcgagtacaacaaggccaccgaagatgagtactacagacgcccgctgcaggtgctgcgagccagggagcagacctttgggggggtgaattacttcttcgacgtagaggtgggccgcaccatatgtaccaagtcccagcccaacttggacacctgtgccttccatgaacagccagaactgcagaagaaacagttgtgctctttcgagatctacgaagttccctgggaggacagaatgtccctggtgaattccaggtgtcaagaagcc

SEQ ID NO: 5013 - DNA, 363 bp, Homo Sapiens
tggagccccaaggaggaggataggataatcccgggtggcatctataacgcagacctcaatgatgagtgggtacagcgtgcccttcacttcgccatcagcgagtataacaaggccaccaaagatgactactacagacgtccgctgcgggtactaagagccaggcaacagaccgttgggggggtgaattacttcttcgacgtagaggtgggccgaaccatatgtaccaagtcccagcccaacttggacacctgtgccttccatgaacagccagaactgcagaagaaacagttgtgctctttcgagatctacgaagttccctgggagaacagaaggtccctggtgaaatccaggtgtcaagaatcc

SEQ ID NO: 5014 - DNA, 207 bp, Homo Sapiens
cagcactggtcctatggactgcgccctggaggaaagagagatgccgaaaatttgattgattctttccaagagatagtcaaagaggttggtcaactggcagaaacccaacgcttcgaatgcaccacgcaccagccacgttctcccctccgagacctgaaaggagctctggaaagtctgattgaagaggaaactgggcagaagaagatt

SEQ ID NO: 5015 - DNA, 282 bp, Homo Sapiens
gccgcgccggacctcgacgtgcgcaagtgcctcccctgcggccccgggggcaaaggccgctgcttcgggcccaatatctgctgcgcggaagagctgggctgcttcgtgggcaccgccgaagcgctgcgctgccaggaggagaactacctgccgtcgccctgccagtccggccagaaggcgtgcgggagcgggggccgctgcgcggtcttgggcctctgctgcagcccggacggctgccacgccgaccctgcctgcgacgcggaagccaccttctcccagcgc

SEQ ID NO: 5016 - DNA, 279 bp, Homo Sapiens
gccatgtccgacctggagctgagacagtgcctcccctgcggccccgggggcaaaggccgctgcttcgggcccagcatctgctgcgcggacgagctgggctgcttcgtgggcacggctgaggcgctgcgctgccaggaggagaactacctgccgtcgccctgccagtccggccagaaggcgtgcgggagcgggggccgctgcgccgccttcggcgtttgctgcaacgacgagagctgcgtgaccgagcccgagtgccgcgagggctttcaccgccgcgcc

SEQ ID NO: 5017 - DNA, 267 bp, Homo Sapiens
gagctgactggccagcgactccgggagggagatggccccgacggccctgccgatgacggcgcaggggcccaggccgacctggagcacagcctgctggtggcggccgagaagaaggacgagggcccctacaggatggagcacttccgctggggcagcccgcccaaggacaagcgctacggcggtttcatgacctccgagaagagccagacgcccctggtgacgctgttcaaaaacgccatcatcaagaacgcctacaagaagggcgag

SEQ ID NO: 5018 - DNA, 336 bp, Homo Sapiens
ttttgtattccaactgagtatacaatgcacatcgaaaggagagagtgtgcttattgcctaaccatcaacaccaccatctgtgctggatattgtatgacacgggatatcaatggcaaactgtttcttcccaaatatgctctgtcccaggatgtttgcacatatagagacttcatctacaggactgtagaaataccaggatgcccactccatgttgctccctatttttcctatcctgttgctttaagctgtaagtgtggcaagtgcaatactgactatagtgactgcatacatgaagccatcaagacaaactactgtaccaaacctcagaagtcttat

SEQ ID NO: 5019 - DNA, 333 bp, Homo Sapiens
aatagctgtgagctgaccaacatcaccattgcaatagagaaagaagaatgtcgtttctgcataagcatcaacaccacttggtgtgctggctactgctacaccagggatctggtgtataaggacccagccaggcccaaaatccagaaaacatgtaccttcaaggaactggtatacgaaacagtgagagtgcccggctgtgctcaccatgcagattccttgtatacatacccagtggccacccagtgtcactgtggcaagtgtgacagcgacagcactgattgtactgtgcgaggcctggggcccagctactgctcctttggtgaaatgaaagaa

SEQ ID NO: 5020 - DNA, 597 bp, Homo Sapiens
ttgcccatctgtcccggcggggctgcccgatgccaggtgacccttcgagacctgtttgaccgcgccgtcgtcctgtcccactacatccataacctctcctcagaaatgttcagcgaattcgataaacggtatacccatggccgggggttcattaccaaggccatcaacagctgccacacttcttcccttgccacccccgaagacaaggagcaagcccaacagatgaatcaaaaagactttctgagcctgatagtcagcatattgcgatcctggaatgagcctctgtatcatctggtcacggaagtacgtggtatgcaagaagccccggaggctatcctatccaaagctgtagagattgaggagcaaaccaaacggcttctagagggcatggagctgatagtcagccaggttcatcctgaaaccaaagaaaatgagatctaccctgtctggtcgggacttccatccctgcagatggctgatgaagagtctcgcctttctgcttattataacctgctccactgcctacgcagggattcacataaaatcgacaattatctcaagctcctgaagtgccgaatcatccacaacaacaactgc

SEQ ID NO: 5021 - DNA, 573 bp, Homo Sapiens
ttcccaaccattcccttatccaggctttttgacaacgctatgctccgcgcccgtcgcctgtaccagctggcatatgacacctatcaggagtttgaagaagcctatatcctgaaggagcagaagtattcattcctgcagaacccccagacctccctctgcttctcagagtctattccaacaccttccaacagggtgaaaacgcagcagaaatctaacctagagctgctccgcatctccctgctgctcatccagtcatggctggagcccgtgcagctcctcaggagcgtcttcgccaacagcctggtgtatggcgcctcggacagcaacgtctatcgccacctgaaggacctagaggaaggcatccaaacgctgatgtggaggctggaagatggcagcccccggactgggcagatcttcaatcagtcctacagcaagtttgacacaaaatcgcacaacgatgacgcactgctcaagaactacgggctgctctactgcttcaggaaggacatggacaaggtcgagacattcctgcgcatcgtgcagtgccgctctgtggagggcagctgtggcttc

SEQ ID NO: 5022 - DNA, 207 bp, Homo Sapiens
cgttcccttcaagacacagaggagaaatccagatcattctcagcttcccaggcagacccactcagtgatcctgatcagatgaacgaggacaagcgccattcacagggcacattcaccagtgactacagcaagtatctggactccaggcgtgcccaagattttgtgcagtggttgatgaataccaagaggaacaggaataacattgcc

SEQ ID NO: 5023 - DNA, 213 bp, Homo Sapiens
tcttggaagccccgctcccagcagccagatgcacccttaggtacaggggccaacagggacctggagctaccctggctggagcagcagggcccagcctctcatcatcgaaggcagctgggaccccagggtcccccacacctcgtggcagacccgtccaagaagcagggaccatggctggaggaagaagaagaagcctatggatggatggacttc

SEQ ID NO: 5024 - DNA, 729 bp, Homo Sapiens
gatgaacccccccagagcccctgggatcgagtgaaggacctggccactgtgtacgtggatgtgctcaaagacagcggcagagactatgtgtcccagtttgaaggctccgccttgggaaaacagctaaacctaaagctccttgacaactgggacagcgtgacctccaccttcagcaagctgcgcgaacagctcggccctgtgacccaggagttctgggataacctggaaaaggagacagagggcctgaggcaggagatgagcaaggatctggaggaggtgaaggccaaggtgcagccctacctggacgacttccagaagaagtggcaggaggagatggagctctaccgccagaaggtggagccgctgcgcgcagagctccaagagggcgcgcgccagaagctgcacgagctgcaagagaagctgagcccactgggcgaggagatgcgcgaccgcgcgcgcgcccatgtggacgcgctgcgcacgcatctggccccctacagcgacgagctgcgccagcgcttggccgcgcgccttgaggctctcaaggagaacggcggcgccagactggccgagtaccacgccaaggccaccgagcatctgagcacgctcagcgagaaggccaagcccgcgctcgaggacctccgccaaggcctgctgcccgtgctggagagcttcaaggtcagcttcctgagcgctctcgaggagtacactaagaagctcaacacccag

SEQ ID NO: 5025 - DNA, 897 bp, Homo Sapiens
aaggtggagcaagcggtggagacagagccggagcccgagctgcgccagcagaccgagtggcagagcggccagcgctgggaactggcactgggtcgcttttgggattacctgcgctgggtgcagacactgtctgagcaggtgcaggaggagctgctcagctcccaggtcacccaggaactgagggcgctgatggacgagaccatgaaggagttgaaggcctacaaatcggaactggaggaacaactgaccccggtggcggaggagacgcgggcacggctgtccaaggagctgcaggcggcgcaggcccggctgggcgcggacatggaggacgtgtgcggccgcctggtgcagtaccgcggcgaggtgcaggccatgctcggccagagcaccgaggagctgcgggtgcgcctcgcctcccacctgcgcaagctgcgtaagcggctcctccgcgatgccgatgacctgcagaagcgcctggcagtgtaccaggccggggcccgcgagggcgccgagcgcggcctcagcgccatccgcgagcgcctggggcccctggtggaacagggccgcgtgcgggccgccactgtgggctccctggccggccagccgctacaggagcgggcccaggcctggggcgagcggctgcgcgcgcggatggaggagatgggcagccggacccgcgaccgcctggacgaggtgaaggagcaggtggcggaggtgcgcgccaagctggaggagcaggcccagcagatacgcctgcaggccgaggccttccaggcccgcctcaagagctggttcgagcccctggtggaagacatgcagcgccagtgggccgggctggtggagaaggtgcaggctgccgtgggcaccagcgccgcccctgtgcccagcgacaatcac

SEQ ID NO: 5026 - DNA, 231 bp, Homo Sapiens
caggcaaaggagccatgtgtggagagcctggtttctcagtacttccagaccgtgactgactatggcaaggacctgatggagaaggtcaagagcccagagcttcaggccgaggccaagtcttactttgaaaagtcaaaggagcagctgacacccctgatcaagaaggctggaacggaactggttaacttcttgagctatttcgtggaacttggaacacagcctgccacccag

SEQ ID NO: 5027 - DNA, 171 bp, Homo Sapiens
accccagacgtctccagtgccttggataagctgaaggagtttggaaacacactggaggacaaggctcgggaactcatcagccgcatcaaacagagtgaactttctgccaagatgcgggagtggttttcagagacatttcagaaagtgaaggagaaactcaagattgactca

SEQ ID NO: 5028 - DNA, 219 bp, Homo Sapiens
gatgagatgcctagcccgaccctcctcacccaggtgaaggaatctctctccagttactgggagtcagcaaagacagccgcccagaacctgtacgagaagacatacctgcccgctgtagatgagaaactcagggacttgtacagcaaaagcacagcagccatgagcacttacacaggcatttttactgaccaagttctttctgtgctgaagggagaggag

SEQ ID NO: 5029 - DNA, 237 bp, Homo Sapiens
tcagaggccgaggatgcctcccttctcagcttcatgcagggttacatgaagcacgccaccaagaccgccaaggatgcactgagcagcgtgcaggagtcccaggtggcccagcaggccaggggctgggtgaccgatggcttcagttccctgaaagactactggagcaccgttaaggacaagttctctgagttctgggatttggaccctgaggtcagaccaacttcagccgtggctgcc

SEQ ID NO: 5030 - DNA, 1341 bp, Homo Sapiens
ggtcatcgaccccttgacaagaagagagaagaggctcccagcctgaggcctgccccaccgcccatcagtggaggtggctatcgggctcgtccagccaaagcagctgccactcaaaagaaagtagaaagaaaagcccctgatgctggaggctgtcttcacgctgacccagacctgggggtgttgtgtcctacaggatgtcagttgcaagaggctttgctacaacaggaaaggccaatcagaaatagtgttgatgagttaaataacaatgtggaagctgtttcccagacctcctcttcttcctttcagtacatgtatttgctgaaagacctgtggcaaaagaggcagaagcaagtaaaagataatgaaaatgtagtcaatgagtactcctcagaactggaaaagcaccaattatatatagatgagactgtgaatagcaatatcccaactaaccttcgtgtgcttcgttcaatcctggaaaacctgagaagcaaaatacaaaagttagaatctgatgtctcagctcaaatggaatattgtcgcaccccatgcactgtcagttgcaatattcctgtggtgtctggcaaagaatgtgaggaaattatcaggaaaggaggtgaaacatctgaaatgtatctcattcaacctgacagttctgtcaaaccgtatagagtatactgtgacatgaatacagaaaatggaggatggacagtgattcagaaccgtcaagacggtagtgttgactttggcaggaaatgggatccatataaacagggatttggaaatgttgcaaccaacacagatgggaagaattactgtggcctaccaggtgaatattggcttggaaatgataaaattagccagcttaccaggatgggacccacagaacttttgatagaaatggaggactggaaaggagacaaagtaaaggctcactatggaggattcactgtacagaatgaagccaacaaataccagatctcagtgaacaaatacagaggaacagccggtaatgccctcatggatggagcatctcagctgatgggagaaaacaggaccatgaccattcacaacggcatgttcttcagcacgtatgacagagacaatgacggctggttaacatcagatcccagaaaacagtgttctaaagaagacggtggtggatggtggtataatagatgtcatgcagccaatccaaacggcagatactactggggtggacagtacacctgggacatggcaaagcatggcacagatgatggtgtagtatggatgaattggaaggggtcatggtactcaatgaggaagatgagtatgaagatcaggcccttcttcccacagcaa

SEQ ID NO: 5031 - DNA, 1233 bp, Homo Sapiens
tatgttgctaccagagacaactgctgcatcttagatgaaagattcggtagttattgtccaactacctgtggcattgcagatttcctgtctacttatcaaaccaaagtagacaaggatctacagtctttggaagacatcttacatcaagttgaaaacaaaacatcagaagtcaaacagctgataaaagcaatccaactcacttataatcctgatgaatcatcaaaaccaaatatgatagacgctgctactttgaagtccaggaaaatgttagaagaaattatgaaatatgaagcatcgattttaacacatgactcaagtattcgatatttgcaggaaatatataattcaaataatcaaaagattgttaacctgaaagagaaggtagcccagcttgaagcacagtgccaggaaccttgcaaagacacggtgcaaatccatgatatcactgggaaagattgtcaagacattgccaataagggagctaaacagagcgggctttactttattaaacctctgaaagctaaccagcaattcttagtctactgtgaaatcgatgggtctggaaatggatggactgtgtttcagaagagacttgatggcagtgtagatttcaagaaaaactggattcaatataaagaaggatttggacatctgtctcctactggcacaacagaattttggctgggaaatgagaagattcatttgataagcacacagtctgccatcccatatgcattaagagtggaactggaagactggaatggcagaaccagtactgcagactatgccatgttcaaggtgggacctgaagctgacaagtaccgcctaacatatgcctacttcgctggtggggatgctggagatgcctttgatggctttgattttggcgatgatcctagtgacaagtttttcacatcccataatggcatgcagttcagtacctgggacaatgacaatgataagtttgaaggcaactgtgctgaacaggatggatctggttggtggatgaacaagtgtcacgctggccatctcaatggagtttattaccaaggtggcacttactcaaaagcatctactcctaatggttatgataatggcattatttgggccacttggaaaacccggtggtattccatgaagaaaaccactatgaagataatcccattcaacagactcacaattggagaaggacagcaacaccacctggggggagccaaacaggctggagacgtt

SEQ ID NO: 5032 - DNA, 216 bp, Homo Sapiens
ttaagtaccactgaggtggcaatgcacacttcaacctcttcttcagtcacaaagagttacatctcatcacagacaaatgatacgcacaaacgggacacatatgcagccactcctagagctcatgaagtttcagaaatttctgttagaactgtttaccctccagaagaggaaaccggagaaagggtacaacttgcccatcatttctctgaaccagag

SEQ ID NO: 5033 - DNA, 618 bp, Homo Sapiens
cagacagacatgtcgaggaaggcttttgtgtttcccaaagagtcggatacttcctatgtatccctcaaagcaccgttaacgaagcctctcaaagccttcactgtgtgcctccacttctacacggaactgtcctcgacccgtgggtacagtattttctcgtatgccaccaagagacaagacaatgagattctcatattttggtctaaggatataggatacagttttacagtgggtgggtctgaaatattattcgaggttcctgaagtcacagtagctccagtacacatttgtacaagctgggagtccgcctcagggatcgtggagttctgggtagatgggaagcccagggtgaggaagagtctgaagaagggatacactgtgggggcagaagcaagcatcatcttggggcaggagcaggattccttcggtgggaactttgaaggaagccagtccctggtgggagacattggaaatgtgaacatgtgggactttgtgctgtcaccagatgagattaacaccatctatcttggcgggcccttcagtcctaatgtcctgaactggcgggcactgaagtatgaagtgcaaggcgaagtgttcaccaaaccccagctgtggccc

SEQ ID NO: 5034 - DNA, 612 bp, Homo Sapiens
cacacagacctcagtgggaaggtgtttgtatttcctagagaatctgttactgatcatgtaaacttgatcacaccgctggagaagcctctacagaactttaccttgtgttttcgagcctatagtgatctctctcgtgcctacagcctcttctcctacaatacccaaggcagggataatgagctactagtttataaagaaagagttggagagtatagtctatacattggaagacacaaagttacatccaaagttatcgaaaagttcccggctccagtgcacatctgtgtgagctgggagtcctcatcaggtattgctgaattttggatcaatgggacacctttggtgaaaaagggtctgcgacagggttactttgtggaagctcagcccaagattgtcctggggcaggaacaggattcctatgggggcaagtttgataggagccagtcctttgtgggagagattggggatttgtacatgtgggactctgtgctgcccccagaaaatatcctgtctgcctatcagggtacccctctccctgccaatatcctggactggcaggctctgaactatgaaatcagaggatatgtcatcatcaaacccttggtgtgggtc

SEQ ID NO: 5035 - DNA, 978 bp, Homo Sapiens
ggacggacctgtcccaagccagatgatttaccattttccacagtggtcccgttaaaaacattctatgagccaggagaagagattacgtattcctgcaagccgggctatgtgtcccgaggagggatgagaaagtttatctgccctctcacaggactgtggcccatcaacactctgaaatgtacacccagagtatgtccttttgctggaatcttagaaaatggagccgtacgctatacgacttttgaatatcccaacacgatcagtttttcttgtaacactgggttttatctgaatggcgctgattctgccaagtgcactgaggaaggaaaatggagcccggagcttcctgtctgtgctcccatcatctgccctccaccatccatacctacgtttgcaacacttcgtgtttataagccatcagctggaaacaattccctctatcgggacacagcagtttttgaatgtttgccacaacatgcgatgtttggaaatgatacaattacctgcacgacacatggaaattggactaaattaccagaatgcagggaagtaaaatgcccattcccatcaagaccagacaatggatttgtgaactatcctgcaaaaccaacactttattacaaggataaagccacatttggctgccatgatggatattctctggatggcccggaagaaatagaatgtaccaaactgggaaactggtctgccatgccaagttgtaaagcatcttgtaaagtacctgtgaaaaaagccactgtggtgtaccaaggagagagagtaaagattcaggaaaaatttaagaatggaatgctacatggtgataaagtttctttcttctgcaaaaataaggaaaagaagtgtagctatacagaggatgctcagtgtatagatggcactatcgaagtccccaaatgcttcaaggaacacagttctctggctttttggaaaactgatgcatccgatgtaaagccatgc

SEQ ID NO: 5036 - DNA, 549 bp, Homo Sapiens
gagcgcgactgccgagtgagcagcttccgagtcaaggagaacttcgacaaggctcgcttctctgggacctggtacgccatggccaagaaggaccccgagggcctctttctgcaggacaacatcgtcgcggagttctccgtggacgagaccggccagatgagcgccacagccaagggccgagtccgtcttttgaataactgggacgtgtgcgcagacatggtgggcaccttcacagacaccgaggaccctgccaagttcaagatgaagtactggggcgtagcctcctttctccagaaaggaaatgatgaccactggatcgtcgacacagactacgacacgtatgccgtgcagtactcctgccgcctcctgaacctcgatggcacctgtgctgacagctactccttcgtgttttcccgggaccccaacggcctgcccccagaagcgcagaagattgtaaggcagcggcaggaggagctgtgcctggccaggcagtacaggctgatcgtccacaacggttactgcgatggcagatcagaaagaaaccttttg

SEQ ID NO: 5037 - DNA, 552 bp, Homo Sapiens
ggccctgtgccaacgccgcccgacaacatccaagtgcaggaaaacttcaatatctctcggatctatgggaagtggtacaacctggccatcggttccacctgcccctggctgaagaagatcatggacaggatgacagtgagcacgctggtgctgggagagggcgctacagaggcggagatcagcatgaccagcactcgttggcggaaaggtgtctgtgaggagacgtctggagcttatgagaaaacagatactgatgggaagtttctctatcacaaatccaaatggaacataaccatggagtcctatgtggtccacaccaactatgatgagtatgccattttcctgaccaagaaattcagccgccatcatggacccaccattactgccaagctctacgggcgggcgccgcagctgagggaaactctcctgcaggacttcagagtggttgcccagggtgtgggcatccctgaggactccatcttcaccatggctgaccgaggtgaatgtgtccctggggagcaggaaccagagcccatcttaatcccgagagtc

SEQ ID NO: 5038 - DNA, 549 bp, Homo Sapiens
cagatcccattgtgtgccaacctagtaccggtgcccatcaccaacgccaccctggaccggatcactggcaagtggttttatatcgcatcggcctttcgaaacgaggagtacaataagtcggttcaggagatccaagcaaccttcttttacttcacccccaacaagacagaggacacgatctttctcagagagtaccagacccgacaggaccagtgcatctataacaccacctacctgaatgtccagcgggaaaatgggaccatctccagatacgtgggaggccaagagcatttcgctcacttgctgatcctcagggacaccaagacctacatgcttgcttttgacgtgaacgatgagaagaactgggggctgtctgtctatgctgacaagccagagacgaccaaggagcaactgggagagttctacgaagctctcgactgcttgcgcattcccaagtcagatgtcgtgtacaccgattggaaaaaggataagtgtgagccactggagaagcagcacgagaaggagaggaaacaggaggagggggaatcc

SEQ ID NO: 5039 - DNA, 1047 bp, Homo Sapiens
gccccacatggcccagggctgatttatagacaaccgaactgcgatgatccagaaactgaggaagcagctctggtggctatagactacatcaatcaaaaccttccttggggatacaaacacaccttgaaccagattgatgaagtaaaggtgtggcctcagcagccctccggagagctgtttgagattgaaatagacaccctggaaaccacctgccatgtgctggaccccacccctgtggcaagatgcagcgtgaggcagctgaaggagcatgctgtcgaaggagactgtgatttccagctgttgaaactagatggcaagttttccgtggtatacgcaaaatgtgattccagtccagactcagccgaggacgtgcgcaaggtgtgccaagactgccccctgctggccccgctgaacgacaccagggtggtgcacgccgcgaaagctgccctggccgccttcaacgctcagaacaacggctccaattttcagctggaggaaatttcccgggctcagcttgtgcccctcccaccttctacctatgtggagtttacagtgtctggcactgactgtgttgctaaagaggccacagaggcagccaagtgtaacctgctggcagaaaagcaatatggcttttgtaaggcaacactcagtgagaagcttggtggggcagaggttgcagtgacctgcacggtgttccaaacacagcccgtgacctcacagccccaaccagaaggtgccaatgaagcagtccccacccccgtggtggacccagatgcacctccgtcccctccacttggcgcacctggactccctccagctggctcacccccagactcccatgtgttactggcagctcctccaggacaccagttgcaccgggcgcactacgacctgcgccacaccttcatgggtgtggtctcattggggtcaccctcaggagaagtgtcgcacccccggaaaacacgcacagtggtgcagcctagtgttggtgctgctgctgggccagtggttcctccatgtccggggaggatcagacacttcaaggtc

SEQ ID NO: 5040 - DNA, 381 bp, Homo Sapiens
ggccctacgggcaccggtgaatccaagtgtcctctgatggtcaaagttctagatgctgtccgaggcagtcctgccatcaatgtggccgtgcatgtgttcagaaaggctgctgatgacacctgggagccatttgcctctgggaaaaccagtgagtctggagagctgcatgggctcacaactgaggaggaatttgtagaagggatatacaaagtggaaatagacaccaaatcttactggaaggcacttggcatctccccattccatgagcatgcagaggtggtattcacagccaacgactccggcccccgccgctacaccattgccgccctgctgagcccctactcctattccaccacggctgtcgtcaccaatcccaaggaa

SEQ ID NO: 5041 - DNA, 1755 bp, Homo Sapiens
gatgcacacaagagtgaggttgctcatcggtttaaagatttgggagaagaaaatttcaaagccttggtgttgattgcctttgctcagtatcttcagcagtgtccatttgaagatcatgtaaaattagtgaatgaagtaactgaatttgcaaaaacatgtgttgctgatgagtcagctgaaaattgtgacaaatcacttcataccctttttggagacaaattatgcacagttgcaactcttcgtgaaacctatggtgaaatggctgactgctgtgcaaaacaagaacctgagagaaatgaatgcttcttgcaacacaaagatgacaacccaaacctcccccgattggtgagaccagaggttgatgtgatgtgcactgcttttcatgacaatgaagagacatttttgaaaaaatacttatatgaaattgccagaagacatccttacttttatgccccggaactccttttctttgctaaaaggtataaagctgcttttacagaatgttgccaagctgctgataaagctgcctgcctgttgccaaagctcgatgaacttcgggatgaagggaaggcttcgtctgccaaacagagactcaagtgtgccagtctccaaaaatttggagaaagagctttcaaagcatgggcagtagctcgcctgagccagagatttcccaaagctgagtttgcagaagtttccaagttagtgacagatcttaccaaagtccacacggaatgctgccatggagatctgcttgaatgtgctgatgacagggcggaccttgccaagtatatctgtgaaaatcaagattcgatctccagtaaactgaaggaatgctgtgaaaaacctctgttggaaaaatcccactgcattgccgaagtggaaaatgatgagatgcctgctgacttgccttcattagctgctgattttgttgaaagtaaggatgtttgcaaaaactatgctgaggcaaaggatgtcttcctgggcatgtttttgtatgaatatgcaagaaggcatcctgattactctgtcgtgctgctgctgagacttgccaagacatatgaaaccactctagagaagtgctgtgccgctgcagatcctcatgaatgctatgccaaagtgttcgatgaatttaaacctcttgtggaagagcctcagaatttaatcaaacaaaattgtgagctttttgagcagcttggagagtacaaattccagaatgcgctattagttcgttacaccaagaaagtaccccaagtgtcaactccaactcttgtagaggtctcaagaaacctaggaaaagtgggcagcaaatgttgtaaacatcctgaagcaaaaagaatgccctgtgcagaagactatctatccgtggtcctgaaccagttatgtgtgttgcatgagaaaacgccagtaagtgacagagtcaccaaatgctgcacagaatccttggtgaacaggcgaccatgcttttcagctctggaagtcgatgaaacatacgttcccaaagagtttaatgctgaaacgttcaccttccatgcagatatatgcacactttctgagaaggagagacaaatcaagaaacaaactgcacttgttgagcttgtgaaacacaagcccaaggcaacaaaagagcaactgaaagctgttatggatgatttcgcagcttttgtagagaagtgctgcaaggctgacgataaggagacctgctttgccgaggagggtaaaaaacttgttgctgcaagtcaagctgccttaggctta

SEQ ID NO: 5042 - DNA, 1773 bp, Homo Sapiens
agaacactgcatagaaatgaatatggaatagcttccatattggattcttaccaatgtactgcagagataagtttagctgacctggctaccatattttttgcccagtttgttcaagaagccacttacaaggaagtaagcaaaatggtgaaagatgcattgactgcaattgagaaacccactggagatgaacagtcttcagggtgtttagaaaaccagctacctgcctttctggaagaactttgccatgagaaagaaattttggagaagtacggacattcagactgctgcagccaaagtgaagagggaagacataactgttttcttgcacacaaaaagcccactccagcatcgatcccacttttccaagttccagaacctgtcacaagctgtgaagcatatgaagaagacagggagacattcatgaacaaattcatttatgagatagcaagaaggcatcccttcctgtatgcacctacaattcttctttgggctgctcgctatgacaaaataattccatcttgctgcaaagctgaaaatgcagttgaatgcttccaaacaaaggcagcaacagttacaaaagaattaagagaaagcagcttgttaaatcaacatgcatgtgcagtaatgaaaaattttgggacccgaactttccaagccataactgttactaaactgagtcagaagtttaccaaagttaattttactgaaatccagaaactagtcctggatgtggcccatgtacatgagcactgttgcagaggagatgtgctggattgtctgcaggatggggaaaaaatcatgtcctacatatgttctcaacaagacactctgtcaaacaaaataacagaatgctgcaaactgaccacgctggaacgtggtcaatgtataattcatgcagaaaatgatgaaaaacctgaaggtctatctccaaatctaaacaggtttttaggagatagagattttaaccaattttcttcaggggaaaaaaatatcttcttggcaagttttgttcatgaatattcaagaagacatcctcagcttgctgtctcagtaattctaagagttgctaaaggataccaggagttattggagaagtgtttccagactgaaaaccctcttgaatgccaagataaaggagaagaagaattacagaaatacatccaggagagccaagcattggcaaagcgaagctgcggcctcttccagaaactaggagaatattacttacaaaatgcgtttctcgttgcttacacaaagaaagccccccagctgacctcgtcggagctgatggccatcaccagaaaaatggcagccacagcagccacttgttgccaactcagtgaggacaaactattggcctgtggcgagggagcggctgacattattatcggacacttatgtatcagacatgaaatgactccagtaaaccctggtgttggccagtgctgcacttcttcatatgccaacaggaggccatgcttcagcagcttggtggtggatgaaacatatgtccctcctgcattctctgatgacaagttcattttccataaggatctgtgccaagctcagggtgtagcgctgcaaacgatgaagcaagagtttctcattaaccttgtgaagcaaaagccacaaataacagaggaacaacttgaggctgtcattgcagatttctcaggcctgttggagaaatgctgccaaggccaggaacaggaagtctgctttgctgaagagggacaaaaactgatttcaaaaactcgtgctgctttgggagtt

SEQ ID NO: 5043 - DNA, 1374 bp, Homo Sapiens
ttagagagaggccgggattatgaaaagaataaagtctgcaaggaattctcccatctgggaaaggaggacttcacatctctgtcactagtcctgtacagtagaaaatttcccagtggcacgtttgaacaggtcagccaacttgtgaaggaagttgtctccttgaccgaagcctgctgtgcggaaggggctgaccctgactgctatgacaccaggacctcagcactgtctgccaagtcctgtgaaagtaattctccattccccgttcacccaggcactgctgagtgctgcaccaaagagggcctggaacgaaagctctgcatggctgctctgaaacaccagccacaggaattccctacctacgtggaacccacaaatgatgaaatctgtgaggcgttcaggaaagatccaaaggaatatgctaatcaatttatgtgggaatattccactaattacggacaagctcctctgtcacttttagtcagttacaccaagagttatctttctatggtagggtcctgctgtacctctgcaagcccaactgtatgctttttgaaagagagactccagcttaaacatttatcacttctcaccactctgtcaaatagagtctgctcacaatatgctgcttatggggagaagaaatcaaggctcagcaatctcataaagttagcccaaaaagtgcctactgctgatctggaggatgttttgccactagctgaagatattactaacatcctctccaaatgctgtgagtctgcctctgaagattgcatggccaaagagctgcctgaacacacagtaaaactctgtgacaatttatccacaaagaattctaagtttgaagactgttgtcaagaaaaaacagccatggacgtttttgtgtgcacttacttcatgccagctgcccaactccccgagcttccagatgtagagttgcccacaaacaaagatgtgtgtgatccaggaaacaccaaagtcatggataagtatacatttgaactaagcagaaggactcatcttccggaagtattcctcagtaaggtacttgagccaaccctaaaaagccttggtgaatgctgtgatgttgaagactcaactacctgttttaatgctaagggccctctactaaagaaggaactatcttctttcattgacaagggacaagaactatgtgcagattattcagaaaatacatttactgagtacaagaaaaaactggcagagcgactaaaagcaaaattgcctgatgccacacccacggaactggcaaagctggttaacaagcgctcagactttgcctccaactgctgttccataaactcacctcctctttactgtgattcagagattgatgctgaattgaagaatatcctg

SEQ ID NO: 5044 - DNA, 450 bp, Homo Sapiens
caggacttagatgaagatgtcagccaagaagacgttcccttggtaatatcagatggaggagactctgagcagttcatagatgaggagcgtcagggaccacctttgggaggacagcaatctcaaccctctgctggtgatgggaaccaggatgatggccctcagcagggaccaccccaacaaggaggccagcagcaacaaggtccaccacctcctcagggaaagccacaaggaccaccccaacagggaggccatccccctcctcctcaaggaaggccacaaggaccaccccaacagggaggccatccccgtcctcctcgaggaaggccacaaggaccaccccaacagggaggccatcagcaaggtcctcccccacctcctcctggaaagccccagggaccacctccccaagggggccgcccacaaggacctccacaggggcagtctcctcag

SEQ ID NO: 5045 - DNA, 171 bp, Homo Sapiens
caaagaggccccaggggaccatatccacctggaccgctggctcctcctcaaccttttggcccaggatttgttccaccacctcctcctccaccctatggtccagggagaatcccacctcctcctcccgcaccctatggtccagggatatttccaccaccccctcctcaaccc

SEQ ID NO: 5046 - DNA, 147 bp, Homo Sapiens
tacctgtatcaatggctgggagccccagtcccctacccggatcccctggagcccaggagggaggtgtgtgagctcaatccggactgtgacgagttggctgaccacatcggctttcaggaggcctatcggcgcttctacggcccggtc

SEQ ID NO: 5047 - DNA, 369 bp, Homo Sapiens
caggataactccaggtacacacacttcctgacccagcactatgatgccaaaccacagggccgggatgacagatactgtgaaagcatcatgaggagacggggcctgacctcaccctgcaaagacatcaacacatttattcatggcaacaagcgcagcatcaaggccatctgtgaaaacaagaatggaaaccctcacagagaaaacctaagaataagcaagtcttctttccaggtcaccacttgcaagctacatggaggttccccctggcctccatgccagtaccgagccacagcggggttcagaaacgttgttgttgcttgtgaaaatggcttacctgtccacttggatcagtcaattttccgtcgtccg

SEQ ID NO: 5048 - DNA, 1821 bp, Homo Sapiens
gaatgtgtgactcagttgttgaaggacacctgctttgaaggaggggacattactacggtcttcacaccaagcgccaagtactgccaggtagtctgcacttaccacccaagatgtttactcttcactttcacggcggaatcaccatctgaggatcccacccgatggtttacttgtgtcctgaaagacagtgttacagaaacactgccaagagtgaataggacagcagcgatttctgggtattctttcaagcaatgctcacaccaaataagcgcttgcaacaaagacatttatgtggacctagacatgaagggcataaactataacagctcagttgccaagagtgctcaagaatgccaagaaagatgcacggatgacgtccactgccactttttcacgtacgccacaaggcagtttcccagcctggagcatcgtaacatttgtctactgaagcacacccaaacagggacaccaaccagaataacgaagctcgataaagtggtgtctggattttcactgaaatcctgtgcactttctaatctggcttgtattagggacattttccctaatacggtgtttgcagacagcaacatcgacagtgtcatggctcccgatgcttttgtctgtggccgaatctgcactcatcatcccggttgcttgttttttaccttcttttcccaggaatggcccaaagaatctcaaagaaatctttgtctccttaaaacatctgagagtggattgcccagtacacgcattaaaaagagcaaagctctttctggtttcagtctacaaagctgcaggcacagcatcccagtgttctgccattcttcattttaccatgacactgatttcttgggagaagaactggatattgttgctgcaaaaagtcacgaggcctgccagaaactgtgcaccaatgccgtccgctgccagttttttacctataccccagcccaagcatcctgcaacgaagggaagggcaagtgttacttaaagctttcttcaaacggatctccaactaaaatacttcacgggagaggaggcatctctggatacacattaaggttgtgtaaaatggataatgagtgtaccaccaaaatcaagcccaggatcgttggaggaactgcgtctgttcgtggtgagtggccgtggcaggtgaccctgcacacaacctcacccactcagagacacctgtgtggaggctccatcattggaaaccagtggatattaacagccgctcactgtttctatggggtagagtcacctaagattttgcgtgtctacagtggcattttaaatcaatctgaaataaaagaggacacatctttctttggggttcaagaaataataatccatgatcagtataaaatggcagaaagcgggtatgatattgccttgttgaaactggaaaccacagtgaattacacagattctcaacgacccatatgcctgccttccaaaggagatagaaatgtaatatacactgattgctgggtgactggatgggggtacagaaaactaagagacaaaatacaaaatactctccagaaagccaagatacccttagtgaccaacgaagagtgccagaagagatacagaggacataaaataacccataagatgatctgtgccggctacagggaaggagggaaggacgcttgcaagggagattcgggaggccctctgtcctgcaaacacaatgaggtctggcatctggtaggcatcacgagctggggcgaaggctgtgctcaaagggagcggccaggtgtttacaccaacgtggtcgagtacgtggactggattctggagaaaactcaagcagtg

SEQ ID NO: 5049 - DNA, 1857 bp, Homo Sapiens
ggatgtctgactcaactctatgaaaacgccttcttcagaggtggggatgtagcttccatgtacaccccaaatgcccaatactgccagatgaggtgcacattccacccaaggtgtttgctattcagttttcttccagcaagttcaatcaatgacatggagaaaaggtttggttgcttcttgaaagatagtgttacaggaaccctgccaaaagtacatcgaacaggtgcagtttctggacattccttgaagcaatgtggtcatcaaataagtgcttgccatcgagacatttataaaggagttgatatgagaggagtcaattttaatgtgtctaaggttagcagtgttgaagaatgccaaaaaaggtgcaccaataacattcgctgccagtttttttcatatgccacgcaaacatttcacaaggcagagtaccggaacaattgcctattaaagtacagtcccggaggaacacctaccgctataaaggtgctgagtaacgtggaatctggattctcactgaagccctgtgccctttcagaaattggttgccacatgaacatcttccagcatcttgcgttctcagatgtggatgttgccagggttctcactccagatgcttttgtgtgtcggaccatctgcacctatcaccccaactgcctcttctttacattctatacaaatgtatggaaaatcgagtcacaaagaaatgtttgtcttcttaaaacatctgaaagtggcacaccaagttcctctactcctcaagaaaacaccatatctggatatagccttttaacctgcaaaagaactttacctgaaccctgccattctaaaatttacccgggagttgactttggaggagaagaattgaatgtgacttttgttaaaggagtgaatgtttgccaagagacttgcacaaagatgattcgctgtcagtttttcacttattctttactcccagaagactgtaaggaagagaagtgtaagtgtttcttaagattatctatggatggttctccaactaggattgcgtatgggacacaagggagctctggttactctttgagattgtgtaacactggggacaactctgtctgcacaacaaaaacaagcacacgcattgttggaggaacaaactcttcttggggagagtggccctggcaggtgagcctgcaggtgaagctgacagctcagaggcacctgtgtggagggtcactcataggacaccagtgggtcctcactgctgcccactgctttgatgggcttcccctgcaggatgtttggcgcatctatagtggcattttaaatctgtcagacattacaaaagatacacctttctcacaaataaaagagattattattcaccaaaactataaagtctcagaagggaatcatgatatcgccttgataaaactccaggctcctttgaattacactgaattccaaaaaccaatatgcctaccttccaaaggtgacacaagcacaatttataccaactgttgggtaaccggatggggcttctcgaaggagaaaggtgaaatccaaaatattctacaaaaggtaaatattcctttggtaacaaatgaagaatgccagaaaagatatcaagattataaaataacccaacggatggtctgtgctggctataaagaagggggaaaagatgcttgtaagggagattcaggtggtcccttagtttgcaaacacaatggaatgtggcgtttggtgggcatcaccagctggggtgaaggctgtgcccgcagggagcaacctggtgtctacaccaaagtcgctgagtacatggactggattttagagaaaacacagagcagtgatggaaaagctcagatgcagtcaccagca

SEQ ID NO: 5050 - DNA, 510 bp, Homo Sapiens
tttgtcctcactgaggggaaccctcgctgggagcaaacacatctgacctacaggattgaaaattacacgccagatttgccaagagcagatgtggaccatgccattgagaaagccttccaactctggagtaatgtcacacctctgacattcaccaaggtctctgagggtcaagcagacatcatgatatcttttgtcaggggagatcatcgggacaactctccttttgatggacctggaggaaatcttgctcatgcttttcaaccaggcccaggtattggaggggatgctcattttgatgaagatgaaaggtggaccaacaatttcagagagtacaacttacatcgtgttgcggctcatgaactcggccattctcttggactctcccattctactgatatcggggctttgatgtaccctagctacaccttcagtggtgatgttcagctagctcaggatgacattgatggcatccaagccatatatggacgttcccaaaatcctgtccagccc

SEQ ID NO: 5051 - DNA, 321 bp, Homo Sapiens
tctggaaagtccttcaaagctggagtctgtcctcctaagaaatctgcccagtgccttagatacaagaaacctgagtgccagagtgactggcagtgtccagggaagaagagatgttgtcctgacacttgtggcatcaaatgcctggatcctgttgacaccccaaacccaacaaggaggaagcctgggaagtgcccagtgacttatggccaatgtttgatgcttaacccccccaatttctgtgagatggatggccagtgcaagcgtgacttgaagtgttgcatgggcatgtgtgggaaatcctgcgtttcccctgtgaaagct

SEQ ID NO: 5052 - DNA, 156 bp, Homo Sapiens
atggcccagcagtggagcctccaaaggctcgcaggccgccatccgcaggacagctatgaggacagcacccagtccagcatcttcacctacaccaacagcaactccaccagaggccccttcgaaggcccgaattaccacatcgctcccagatgggtg

SEQ ID NO: 5053 - DNA, 1647 bp, Homo Sapiens
aattgtggtcctccacccactttatcatttgctgccccgatggatattacgttgactgagacacgcttcaaaactggaactactctgaaatacacctgcctccctggctacgtcagatcccattcaactcagacgcttacctgtaattctgatggcgaatgggtgtataacaccttctgtatctacaaacgatgcagacacccaggagagttacgtaatgggcaagtagagattaagacagatttatcttttggatcacaaatagaattcagctgttcagaaggatttttcttaattggctcaaccactagtcgttgtgaagtccaagatagaggagttggctggagtcatcctctcccacaatgtgaaattgtcaagtgtaagcctcctccagacatcaggaatggaaggcacagcggtgaagaaaatttctacgcatacggcttttctgtcacctacagctgtgacccccgcttctcactcttgggccatgcctccatttcttgcactgtggagaatgaaacaataggtgtttggagaccaagccctcctacctgtgaaaaaatcacctgtcgcaagccagatgtttcacatggggaaatggtctctggatttggacccatctataattacaaagacactattgtgtttaagtgccaaaaaggttttgttctcagaggcagcagtgtaattcattgtgatgctgatagcaaatggaatccttctcctcctgcttgtgagcccaatagttgtattaatttaccagacattccacatgcttcctgggaaacatatcctaggccgacaaaagaggatgtgtatgttgttgggactgtgttaaggtaccgctgtcatcctggctacaaacccactacagatgagcctacgactgtgatttgtcagaaaaatttgagatggaccccataccaaggatgtgaggcgttatgttgccctgaaccaaagctaaataatggtgaaatcactcaacacaggaaaagtcgtcctgccaatcactgtgtttatttctatggagatgagatttcattttcatgtcatgagaccagtaggttttcagctatatgccaaggagatggcacgtggagtccccgaacaccatcatgtggagacatttgcaattttcctcctaaaattgcccatgggcattataaacaatctagttcatacagctttttcaaagaagagattatatatgaatgtgataaaggctacattctggtcggacaggcgaaactctcctgcagttattcacactggtcagctccagcccctcaatgtaaagctctgtgtcggaaaccagaattagtgaatggaaggttgtctgtggataaggatcagtatgttgagcctgaaaatgtcaccatccaatgtgattctggctatggtgtggttggtccccaaagtatcacttgctctgggaacagaacctggtacccagaggtgcccaagtgtgagtgggagacccccgaaggctgtgaacaagtgctcacaggcaaaagactcatgcagtgtctcccaaacccagaggatgtgaaaatggccctggaggtatataagctgtctctggaaattgaacaactggaactacagagagacagcgcaagacaatccactttggataaagaacta

SEQ ID NO: 5054 - DNA, 1377 bp, Homo Sapiens
gaccaagagtcatgcaagggccgctgcactgagggcttcaacgtggacaagaagtgccagtgtgacgagctctgctcttactaccagagctgctgcacagactatacggctgagtgcaagccccaagtgactcgcggggatgtgttcactatgccggaggatgagtacacggtctatgacgatggcgaggagaaaaacaatgccactgtccatgaacaggtggggggcccctccctgacctctgacctccaggcccagtccaaagggaatcctgagcagacacctgttctgaaacctgaggaagaggcccctgcgcctgaggtgggcgcctctaagcctgaggggatagactcaaggcctgagacccttcatccagggagacctcagcccccagcagaggaggagctgtgcagtgggaagcccttcgacgccttcaccgacctcaagaacggttccctctttgccttccgagggcagtactgctatgaactggacgaaaaggcagtgaggcctgggtaccccaagctcatccgagatgtctggggcatcgagggccccatcgatgccgccttcacccgcatcaactgtcaggggaagacctacctcttcaagggtagtcagtactggcgctttgaggatggtgtcctggaccctgattacccccgaaatatctctgacggcttcgatggcatcccggacaacgtggatgcagccttggccctccctgcccatagctacagtggccgggagcgggtctacttcttcaaggggaaacagtactgggagtaccagttccagcaccagcccagtcaggaggagtgtgaaggcagctccctgtcggctgtgtttgaacactttgccatgatgcagcgggacagctgggaggacatcttcgagcttctcttctggggcagaacctctgctggtaccagacagccccagttcattagccgggactggcacggtgtgccagggcaagtggacgcagccatggctggccgcatctacatctcaggcatggcaccccgcccctccttggccaagaaacaaaggtttaggcatcgcaaccgcaaaggctaccgttcacaacgaggccacagccgtggccgcaaccagaactcccgccggccatcccgcgccatgtggctgtccttgttctccagtgaggagagcaacttgggagccaacaactatgatgactacaggatggactggcttgtgcctgccacctgtgaacccatccagagtgtcttcttcttctctggagacaagtactaccgagtcaatcttcgcacacggcgagtggacactgtggaccctccctacccacgctccatcgctcagtactggctgggctgcccagctcctggccatctg

SEQ ID NO: 5055 - DNA, 378 bp, Homo Sapiens
gccgtgtggcagttccgcaaaatgatcaagtgcgtgatcccggggagtgaccccttcttggaatacaacaactacggctgctactgtggcttggggggctcaggcacccccgtggatgaactggacaagtgctgccagacacatgacaactgctatgaccaggccaagaagctggacagctgtaaatttctgctggacaacccgtacacccacacctattcatactcgtgctctggctcggcaatcacctgtagcagcaaaaacaaagagtgtgaggccttcatttgcaactgcgaccgcaacgctgccatctgcttttcaaaagctccatataacaaggcacacaagaacctggacaccaagaagtattgtcagagt

SEQ ID NO: 5056 - DNA, 1491 bp, Homo Sapiens
gcccgcccctgcatccctaaaagcttcggctacagctcggtggtgtgtgtctgcaatgccacatactgtgactcctttgaccccccgacctttcctgcccttggtaccttcagccgctatgagagtacacgcagtgggcgacggatggagctgagtatggggcccatccaggctaatcacacgggcacaggcctgctactgaccctgcagccagaacagaagttccagaaagtgaagggatttggaggggccatgacagatgctgctgctctcaacatccttgccctgtcaccccctgcccaaaatttgctacttaaatcgtacttctctgaagaaggaatcggatataacatcatccgggtacccatggccagctgtgacttctccatccgcacctacacctatgcagacacccctgatgatttccagttgcacaacttcagcctcccagaggaagataccaagctcaagatacccctgattcaccgagccctgcagttggcccagcgtcccgtttcactccttgccagcccctggacatcacccacttggctcaagaccaatggagcggtgaatgggaaggggtcactcaagggacagcccggagacatctaccaccagacctgggccagatactttgtgaagttcctggatgcctatgctgagcacaagttacagttctgggcagtgacagctgaaaatgagccttctgctgggctgttgagtggataccccttccagtgcctgggcttcacccctgaacatcagcgagacttcattgcccgtgacctaggtcctaccctcgccaacagtactcaccacaatgtccgcctactcatgctggatgaccaacgcttgctgctgccccactgggcaaaggtggtactgacagacccagaagcagctaaatatgttcatggcattgctgtacattggtacctggactttctggctccagccaaagccaccctaggggagacacaccgcctgttccccaacaccatgctctttgcctcagaggcctgtgtgggctccaagttctgggagcagagtgtgcggctaggctcctgggatcgagggatgcagtacagccacagcatcatcacgaacctcctgtaccatgtggtcggctggaccgactggaaccttgccctgaaccccgaaggaggacccaattgggtgcgtaactttgtcgacagtcccatcattgtagacatcaccaaggacacgttttacaaacagcccatgttctaccaccttggccacttcagcaagttcattcctgagggctcccagagagtggggctggttgccagtcagaagaacgacctggacgcagtggcactgatgcatcccgatggctctgctgttgtggtcgtgctaaaccgctcctctaaggatgtgcctcttaccatcaaggatcctgctgtgggcttcctggagacaatctcacctggctactccattcacacctacctgtggcgtcgccag

SEQ ID NO: 5057 - DNA, 1305 bp, Homo Sapiens
cagcctccgcgccgctacaccccagactggccgagcctggattctcggccgctgccggcctggttcgacgaagccaagttcggggtgttcatccactggggcgtgttctcggtgcccgcctggggcagcgagtggttctggtggcactggcagggcgaggggcggccgcagtaccagcgcttcatgcgcgacaactacccgcccggcttcagctacgccgacttcggaccgcagttcactgcgcgcttcttccacccggaggagtgggccgacctcttccaggccgcgggcgccaagtatgtagttttgacgacaaagcatcacgaaggcttcacaaactggccgagtcctgtgtcttggaactggaactccaaagacgtggggcctcatcgggatttggttggtgaattgggaacagctctccggaagaggaacatccgctatggactataccactcactcttagagtggttccatccactctatctacttgataagaaaaatggcttcaaaacacagcattttgtcagtgcaaaaacaatgccagagctgtacgaccttgttaacagctataaacctgatctgatctggtctgatggggagtgggaatgtcctgatacttactggaactccacaaattttctttcatggctctacaatgacagccctgtcaaggatgaggtggtagtaaatgaccgatggggtcagaactgttcctgtcaccatggaggatactataactgtgaagataaattcaagccacagagcttgccagatcacaagtgggagatgtgcaccagcattgacaagttttcctggggctatcgtcgtgacatggcattgtctgatgttacagaagaatctgaaatcatttcggaactggttcagacagtaagtttgggaggcaactatcttctgaacattggaccaactaaagatggactgattgttcccatcttccaagaaaggcttcttgctgttgggaaatggctgagcatcaatggggaggctatctatgcctccaaaccatggcgggtgcaatgggaaaagaacacaacatctgtatggtatacctcaaagggatcggctgtttatgccatttttctgcactggccagaaaatggagtcttaaaccttgaatcccccataactacctcaactacaaagataacaatgctgggaattcaaggagatctgaagtggtccacagatccagataaaggtctcttcatctctctaccccagttgccaccctctgctgtccccgcagagtttgcttggactataaagctgacaggagtgaag

SEQ ID NO: 5058 - DNA, 1035 bp, Homo Sapiens
gcaatggtatcagaattcctcaagcaggcctggtttattgaaaatgaagagcaggaatatgttcaaactgtgaagtcatccaaaggtggtcccggatcagcggtgagcccctatcctaccttcaatccatcctcggatgtcgctgccttgcataaggccataatggttaaaggtgtggatgaagcaaccatcattgacattctaactaagcgaaacaatgcacagcgtcaacagatcaaagcagcatatctccaggaaacaggaaagcccctggatgaaacactgaagaaagcccttacaggtcaccttgaggaggttgttttagctctgctaaaaactccagcgcaatttgatgctgatgaacttcgtgctgccatgaagggccttggaactgatgaagatactctaattgagattttggcatcaagaactaacaaagaaatcagagacattaacagggtctacagagaggaactgaagagagatctggccaaagacataacctcagacacatctggagattttcggaacgctttgctttctcttgctaagggtgaccgatctgaggactttggtgtgaatgaagacttggctgattcagatgccagggccttgtatgaagcaggagaaaggagaaaggggacagacgtaaacgtgttcaataccatccttaccaccagaagctatccacaacttcgcagagtgtttcagaaatacaccaagtacagtaagcatgacatgaacaaagttctggacctggagttgaaaggtgacattgagaaatgcctcacagctatcgtgaagtgcgccacaagcaaaccagctttctttgcagagaagcttcatcaagccatgaaaggtgttggaactcgccataaggcattgatcaggattatggtttcccgttctgaaattgacatgaatgatatcaaagcattctatcagaagatgtatggtatctccctttgccaagccatcctggatgaaaccaaaggagattatgagaaaatcctggtggctctttgtggaggaaac

SEQ ID NO: 5059 - DNA, 483 bp, Homo Sapiens
gactcatggatggaggaagttattaaattatgcggccgcgaattagttcgcgcgcagattgccatttgcggcatgagcacctggagcaaaaggtctctgagccaggaagatgctcctcagacacctagaccagtggcagaaattgtgccatccttcatcaacaaagatacagaaaccataaatatgatgtcagaatttgttgctaatttgccacaggagctgaagttaaccctgtctgagatgcagccagcattaccacagctacaacaacatgtacctgtattaaaagattccagtcttctctttgaagaatttaagaaacttattcgcaatagacaaagtgaagccgcagacagcagtccttcagaattaaaatacttaggcttggatactcattctcgaaaaaagagacaactctacagtgcattggctaataaatgttgccatgttggttgtaccaaaagatctcttgctagattttgc

SEQ ID NO: 5060 - DNA, 270 bp, Homo Sapiens
gggatcattatcaacctggagaacggtgagctctgcatgaatagtgcccagtgtaagagcaattgctgccagcattcaagtgcgctgggcctggcccgctgcacatccatggccagcgagaacagcgagtgctctgtcaagacgctctatgggatttactacaagtgtccctgtgagcgtggcctgacctgtgagggagacaagaccatcgtgggctccatcaccaacaccaactttggcatctgccatgacgctggacgctccaagcag

SEQ ID NO: 5061 - DNA, 180 bp, Homo Sapiens
gaggcccagacagagacgtgtacagtggccccccgtgaaagacagaattgtggttttcctggtgtcacgccctcccagtgtgcaaataagggctgctgtttcgacgacaccgttcgtggggtcccctggtgcttctatcctaataccatcgacgtccctccagaagaggagtgtgaattt

SEQ ID NO: 5062 - DNA, 624 bp, Homo Sapiens
aagaagcgcccgaagcctggaggatggaacactgggggcagccgatacccggggcagggcagccctggaggcaaccgctacccacctcagggcggtggtggctgggggcagcctcatggtggtggctgggggcagcctcatggtggtggctgggggcagccccatggtggtggctggggacagcctcatggtggtggctggggtcaaggaggtggcacccacagtcagtggaacaagccgagtaagccaaaaaccaacatgaagcacatggctggtgctgcagcggctggggcagtggtggggggccttggcggctacttgctgggaagtgccatgagcaggcccatcatacatttcggcagtgactatgaggaccgttactatcgtgaaaacatgcaccgttaccccaaccaagtgtactacaggcccatggatgagtacagcaaccagaacaactttgtgcacgactgcgtcaatatcacaatcaagcagcacacggtcaccacaaccaccaagggggagaacttcaccgagaccgacgttaagatgatggagcgcgtggttgagcagatgtgtatcacccagtacgagagggaatctcaggcctattaccagagaggatcg

SEQ ID NO: 5063 - DNA, 1521 bp, Homo Sapiens
gtgagtcccactgactgcagtgctgttgagccggaggctgagaaagctctagacctgatcaataaaaggcgacgggatggctaccttttccaattgctgcggattgctgatgcccacttggacagagtggaaaatacaactgtatattacttagtcttagatgtgcaagaatcggactgttcggtcctatccaggaaatactggaatgactgtgagccacctgattccagacgtccatctgaaatagtgatcggacaatgtaaggtaatagctacaagacattcccatgaatctcaggacctcagagtgattgactttaactgcaccacaagttctgtctcttcagcactggccaataccaaagatagtccggtcctcatagatttctttgaggatactgagcgctacagaaaacaagccaacaaagcccttgagaagtacaaagaggagaatgatgactttgcctctttcagagtggaccgaatcgagagagttgcaagagtgagaggaggggaaggaactggttacttcgtggacttctctgtgcggaactgccccagacaccatttccccagacaccccaatgtctttggattctgcagagcagatttgttctatgatgtagaagccttggacttggaaagcccgaaaaaccttgtcataaactgtgaagtcttcgaccctcaggaacatgagaacatcaatggtgtaccgcctcatttgggacatcccttccactggggtgggcatgagcgttcttctaccaccaagcctccattcaagccccatggatctagagatcatcatcatccccacaagccacacgaacatggacccccacctcctccagatgaaagagatcactcacatggacccccacttccacaaggccctcctccactattgcccatgtcctgctcaagttgtcaacatgccacttttggcacaaatggggcccaaagacattctcataataataattccagtgacctccatccccataagcatcattcccatgaacagcatccccacggacaccatccccatgcacaccatcctcatgaacatgatacccatagacagcatccccatggacaccacccccatggacaccatcctcatggacaccacccccatggacaccatccccatggacaccatccccactgccatgatttccaagactatggaccttgtgacccaccaccccataaccaaggtcactgttgccatggccacggcccaccacctgggcacttaagaaggcgaggcccaggtaaaggaccccgtcccttccattgcagacaaattggatctgtgtaccgactccctcctctaagaaaaggtgaggtgctgccacttcctgaggccaattttcccagcttcccattgccgcaccacaaacatcctctaaagccagacaatcagccctttcctcaatcagtctctgaatcatgtccagggaagttcaagagtgggtttccacaagtttccatgttttttacacatacatttccaaaa

SEQ ID NO: 5064 - DNA, 1119 bp, Homo Sapiens
ctgagacctgttctccccacccagagtgcccacgaccctccggctgtccacctcagcaatggcccaggacaagagcctatcgctgtcatgacctttgacctcaccaagatcacaaaaacctcctcctcctttgaggttcgaacctgggacccagagggagtgattttttatggggataccaaccctaaggatgactggtttatgctgggacttcgagacggcaggcctgagatccaactgcacaatcactgggcccagcttacggtgggtgctggaccacggctggatgatgggagatggcaccaggtggaagtcaagatggagggggactctgtgctgctggaggtggatggggaggaggtgctgcgcctgagacaggtctctgggcccctgaccagcaaacgccatcccatcatgaggattgcgcttggggggctgctcttccccgcttccaaccttcggttgccgctggttcctgccctggatggctgcctgcgccgggattcctggctggacaaacaggccgagatctcagcatctgcccccactagcctcagaagctgtgatgtagaatcaaatcccgggatatttctccctccagggactcaggcagaattcaatctccgagacattccccagcctcatgcagagccctgggccttctctttggacctgggactcaagcaggcagcaggctcaggccacctccttgctcttgggacaccagagaacccatcttggctcagtctccacctccaagatcaaaaggtggtgttgtcttctgggtcggggccagggctggatctgcccctggtcttgggactccctcttcagctgaagctgagtatgtccagggtggtcttgagccaagggtcgaagatgaaggcccttgccctgcctcccttaggcctggctcccctccttaacctctgggccaagcctcaagggcgtctcttcctgggggctttaccaggagaagactcttccacctctttttgcctgaatggcctttgggcacaaggtcagaggctggatgtggaccaggccctgaacagaagccatgagatctggactcacagctgcccccagagcccaggcaatggcactgacgcttcccat

SEQ ID NO: 5065 - DNA, 1029 bp, Homo Sapiens
gccaacagcagtggccgatggtggggtattgtgaacgtagcctcctccacgaacctgcttacagactccaagagtctgcaactggtactcgagcccagtctgcagctgttgagccgcaaacagcggcgtctgatacgccaaaatccggggatcctgcacagcgtgagtggggggctgcagagtgccgtgcgcgagtgcaagtggcagttccggaatcgccgctggaactgtcccactgctccagggccccacctcttcggcaagatcgtcaaccgaggctgtcgagaaacggcgtttatcttcgctatcacctccgccggggtcacccattcggtggcgcgctcctgctcagaaggttccatcgaatcctgcacgtgtgactaccggcggcgcggccccgggggccccgactggcactgggggggctgcagcgacaacattgacttcggccgcctcttcggccgggagttcgtggactccggggagaaggggcgggacctgcgcttcctcatgaaccttcacaacaacgaggcaggccgtacgaccgtattctccgagatgcgccaggagtgcaagtgccacgggatgtccggctcatgcacggtgcgcacgtgctggatgcggctgcccacgctgcgcgccgtgggcgatgtgctgcgcgaccgcttcgacggcgcctcgcgcgtcctgtacggcaaccgcggcagcaaccgcgcttcgcgggcggagctgctgcgcctggagccggaagacccggcccacaaaccgccctccccccacgacctcgtctacttcgagaaatcgcccaacttctgcacgtacagcggacgcctgggcacagcaggcacggcagggcgcgcctgtaacagctcgtcgcccgcgctggacggctgcgagctgctctgctgcggcaggggccaccgcacgcgcacgcagcgcgtcaccgagcgctgcaactgcaccttccactggtgctgccacgtcagctgccgcaactgcacgcacacgcgcgtactgcacgagtgtctg

SEQ ID NO: 5066 - DNA, 1488 bp, Homo Sapiens
cagtattcctcaaatacacaacaaggacgaacatctattgttcatctgtttgaatggcgatgggttgatattgctcttgaatgtgagcgatatttagctcccaagggatttggaggggttcaggtctctccaccaaatgaaaatgttgccattcacaaccctttcagaccttggtgggaaagataccaaccagttagctataaattatgcacaagatctggaaatgaagatgaatttagaaacatggtgactagatgcaacaatgttggggttcgtatttatgtggatgctgtaattaatcatatgtgtggtaatgctgtgagtgcaggaacaagcagtacctgtggaagttacttcaaccctggaagtagggactttccagcagtcccatattctggatgggattttaatgatggtaaatgtaaaactggaagtggagatatcgagaactataatgatgctactcaggtcagagattgtcgtctgtctggtcttctcgatcttgcactggggaaggattatgtgcgttctaagattgccgaatatatgaaccatctcattgacattggtgttgcagggttcagaattgatgcttccaagcacatgtggcctggagacataaaggcaattttggacaaactgcataatctaaacagtaactggttcccggaaggtagtaaacctttcatttaccaggaggtaattgatctgggtggtgagccaattaaaagcagtgactactttggtaatggccgggtgacagaattcaagtatggtgcaaaactcggcacagttattcgcaagtggaatggagagaagatgtcttacttaaagaactggggagaaggttggggtttcatgccttctgacagagcgcttgtctttgtggataaccatgacaatcaacgaggacatggcgctggaggagcctctatacttaccttctgggatgctaggctgtacaaaatggcagttggatttatgcttgctcatccttatggatttacacgagtaatgtcaagctaccgttggccaagatattttgaaaatggaaaagatgttaatgattgggttgggccaccaaatgataatggagtaactaaagaagttactattaatccagacactacttgtggcaatgactgggtctgtgaacatcgatggcgccaaataaggaacatggttaatttccgcaatgtagtggatggccagccttttacaaactggtatgataatgggagcaaccaagtggcttttgggagaggaaacagaggattcattgttttcaacaatgatgactggacattttctttaactttgcaaactggtcttcctgctggcacatactgtgatgtcatttctggagataaaattaatggcaactgcacaggcattaaaatctacgtttctgatgatggcaaagctcatttttctattagtaactctgctgaagatccatttattgcaattcatgctgaatctaaattg

SEQ ID NO: 5067 - DNA, 489 bp, Homo Sapiens
gtcgcggccaaatggaaggacgatgttattaaattatgcggccgcgaattagttcgcgcgcagattgccatttgcggcatgagcacctggagcaaaaggtctctgagccaggaagatgctcctcagacacctagaccagtggcagaaattgtaccatccttcatcaacaaagatacagaaactataattatcatgttggaattcattgctaatttgccaccggagctgaaggcagccctatctgagaggcaaccatcattaccagagctacagcagtatgtacctgcattaaaggattccaatcttagctttgaagaatttaagaaacttattcgcaataggcaaagtgaagccgcagacagcaatccttcagaattaaaatacttaggcttggatactcattctcaaaaaaagagacgaccctacgtggcactgtttgagaaatgttgcctaattggttgtaccaaaaggtctcttgctaaatattgc

SEQ ID NO: 5068 - DNA, 159 bp, Homo Sapiens
caggagcaccccctgcatggctgctcagcctccaacagctcagaggtggacggcggtgagaacatgacatgggccggggcaagacccacgctggggccgggcaacaggagcttggctgggcagtctgggcaggggaagccccggggccagcccaacacg

SEQ ID NO: 5069 - DNA, 171 bp, Homo Sapiens
atgtggtcgacgagaagccccaacagcacggcgtggcctctcagcctcgagcctgatccagggatggcctctgcctccaccacaatgcatactaccaccattgcagagcctgatccagggatgtctggatggccggatggcagaatggagacctccacccccaccataatg

SEQ ID NO: 5070 - DNA, 156 bp, Homo Sapiens
tttacttactttgtgattctggctgagaacggcttcctcccaattcacctgttgggcctccgagtggactgggatgaccgctggatcaacgatgtggaagacagctacgggcagcagtggacctatgagcagaggaaaatcgtggagttcacctgc

SEQ ID NO: 5071 - DNA, 723 bp, Homo Sapiens
gaatttaagcccacatatcaggaccgagtggccccgccaggattaacacagattcctcagatccagaagactgaaatttcctttcgtcctaatgatcccaagagctatgaggcatatgtactgaacatagttaggttcctggaaaagtacaaagattcagcccagagggatgacatgatttttgaagattgtggcgatgtgcccagtgaaccgaaagaacgaggagactttaatcatgaacgaggagagcgaaaggtctgcagattcaagcttgaatggctgggaaattgctctggattaaatgatgaaacttatggctacaaagagggcaaaccgtgcattattataaagctcaaccgagttctaggcttcaaacctaagcctcccaagaatgagtccttggagacttacccagtgatgaagtataacccaaatgtccttcccgttcagtgcactggcaagcgagatgaagataaggataaagttggaaatgtggagtattttggactgggcaactcccctggttttcctctgcagtattatccgtactatggcaaactcctgcagcccaaatacctgcagcccctgctggccgtacagttcaccaatcttaccatggacactgaaattcgcatagagtgtaaggcgtacggtgagaacattgggtacagtgagaaagaccgttttcagggacgttttgatgtaaaaattgaagttaagagc

SEQ ID NO: 5072 - DNA, 1971 bp, Homo Sapiens
atgccagtggataacaggaaccacaatgaaggaatggtgactcgctgcatcattgaggtcctctcaaatgccttgtcgaagtccagcgctccacccatcacccctgagtgccgccaagtcctgaagacgagtagaaaagacgtcaaagacaaagagacaactgaaaatgaaaacacaaagtttgaagtaagattgttaagagacccagctgatgcctcggaagcccacgagtcctccagcaggggagaggcaggagccccaggggaggaggacatccaaggcccaacaaaggcagacacagagaaatgggcagagggaggcgggcacagccgagagcgagcggatgagccccagtggagcctctatccctccgacagccaagtctctgaagaagtgaagacacgccattctgagaagagccagagagaggatgaggaggaggaggagggagagaactatcaaaaaggggagcgaggggaagatagcagtgaagagaaacaccttgaagagccaggagagacacaaaacgcttttctcaatgaaagaaagcaggcttcagctataaaaaaagaggagttagtggccagatcggaaacacatgctgccgggcattctcaggagaagacacatagccgagagaagagtagccaggagagtggagaggaggcagggagccaggagaatcacccccaggagtctaaaggccaaccccgaagccaggaagaatctgaggaaggtgaggaagatgccacctctgaggtggacaaacgacgcacgaggcccagacaccaccacgggaggagcaggcccgacaggtcctctcaaggagggagtcttccctctgaggaaaagggacacccccaggaggaatctgaggagtcaaacgtcagcatggccagtttaggggaaaagagggaccaccattcaacccactacagggcttcagaggaagaacctgaatatggagaagaaataaagggttatccaggcgtccaggcccctgaggacctggagtgggagcgctataggggcagaggaagtgaagaatacagggctccaagacctcagagtgaggagagttgggatgaggaggacaagagaaactaccccagcttagagcttgataagatggcacatggatatggtgaagaaagtgaggaagagaggggccttgagccgggaaagggacgccatcacagaggcaggggaggggagccacgtgcctatttcatgtctgacaccagagaagagaaaaggttcttgggtgaaggacaccaccgtgtccaagaaaaccagatggacaaggcaaggaggcatccacaaggtgcgtggaaagagctggacagaaattatctcaactacggtgaggaaggagccccagggaagtggcagcagcagggagacctgcaggacactaaagaaaacagggaggaagctaggtttcaagataaacaatatagctcccatcacacagctgaaaagaggaagagattaggggaactgttcaacccatactacgaccctctccagtggaagagcagccattttgaaagaagagacaacatgaatgacaattttctcgagggtgaggaggaaaatgagctgaccttgaacgagaagaatttcttcccagaatacaactatgactggtgggagaaaaagcccttctctgaggatgtgaactgggggtatgagaagagaaacctcgccagggtccccaagctggacctgaaaaggcaatatgacagggtggcccaactggaccagctccttcactacaggaagaagtcagctgagtttccagacttctatgattctgaggagccggtgagcacccaccaggaggcagaaaatgaaaaggacagggctgaccagacagtcctgacagaggacgagaaaaaagaactcgaaaacttggctgcaatggatttggaactacagaagatagctgagaaattcagccaaaggggc

SEQ ID NO: 5073 - DNA, 1989 bp, Homo Sapiens
ctggaggtacccactgatggtaatgctggcctgctggctgaaccccagattgccatgttctgtggcagactgaacatgcacatgaatgtccagaatgggaagtgggattcagatccatcagggaccaaaacctgcattgataccaaggaaggcatcctgcagtattgccaagaagtctaccctgaactgcagatcaccaatgtggtagaagccaaccaaccagtgaccatccagaactggtgcaagcggggccgcaagcagtgcaagacccatccccactttgtgattccctaccgctgcttagttggtgagtttgtaagtgatgcccttctcgttcctgacaagtgcaaattcttacaccaggagaggatggatgtttgcgaaactcatcttcactggcacaccgtcgccaaagagacatgcagtgagaagagtaccaacttgcatgactacggcatgttgctgccctgcggaattgacaagttccgaggggtagagtttgtgtgttgcccactggctgaagaaagtgacaatgtggattctgctgatgcggaggaggatgactcggatgtctggtggggcggagcagacacagactatgcagatgggagtgaagacaaagtagtagaagtagcagaggaggaagaagtggctgaggtggaagaagaagaagccgatgatgacgaggacgatgaggatggtgatgaggtagaggaagaggctgaggaaccctacgaagaagccacagagagaaccaccagcattgccaccaccaccaccaccaccacagagtctgtggaagaggtggttcgagaggtgtgctctgaacaagccgagacggggccgtgccgagcaatgatctcccgctggtactttgatgtgactgaagggaagtgtgccccattcttttacggcggatgtggcggcaaccggaacaactttgacacagaagagtactgcatggccgtgtgtggcagcgccattcctacaacagcagccagtacccctgatgccgttgacaagtatctcgagacacctggggatgagaatgaacatgcccatttccagaaagccaaagagaggcttgaggccaagcaccgagagagaatgtcccaggtcatgagagaatgggaagaggcagaacgtcaagcaaagaacttgcctaaagctgataagaaggcagttatccagcatttccaggagaaagtggaatctttggaacaggaagcagccaacgagagacagcagctggtggagacacacatggccagagtggaagccatgctcaatgaccgccgccgcctggccctggagaactacatcaccgctctgcaggctgttcctcctcggcctcgtcacgtgttcaatatgctaaagaagtatgtccgcgcagaacagaaggacagacagcacaccctaaagcatttcgagcatgtgcgcatggtggatcccaagaaagccgctcagatccggtcccaggttatgacacacctccgtgtgatttatgagcgcatgaatcagtctctctccctgctctacaacgtgcctgcagtggccgaggagattcaggatgaagttgatgagctgcttcagaaagagcaaaactattcagatgacgtcttggccaacatgattagtgaaccaaggatcagttacggaaacgatgctctcatgccatctttgaccgaaacgaaaaccaccgtggagctccttcccgtgaatggagagttcagcctggacgatctccagccgtggcattcttttggggctgactctgtgccagccaacacagaaaacgaagttgagcctgttgatgcccgccctgctgccgaccgaggactgaccactcgaccaggttctgggttgacaaatatcaagacggaggagatctctgaagtgaagatggatgcagaattccgacatgactcaggatatgaagttcatcatcaaaaattggtgttctttgcagaagatgtgggttcaaacaaa

SEQ ID NO: 5074 - DNA, 507 bp, Homo Sapiens
caagcatttcatcttgggaagtgccccaatcctccggtgcaggagaattttgacgtgaataagtatctcggaagatggtacgaaattgagaagatcccaacaacctttgagaatggacgctgcatccaggccaactactcactaatggaaaacggaaagatcaaagtgttaaaccaggagttgagagctgatggaactgtgaatcaaatcgaaggtgaagccaccccagttaacctcacagagcctgccaagctggaagttaagttttcctggtttatgccatcggcaccgtactggatcctggccaccgactatgagaactatgccctcgtgtattcctgtacctgcatcatccaactttttcacgtggattttgcttggatcttggcaagaaaccctaatctccctccagaaacagtggactctctaaaaaatatcctgacttctaataacattgatgtcaagaaaatgacggtcacagaccaggtgaactgccccaagctctcg

SEQ ID NO: 5075 - DNA, 279 bp, Homo Sapiens
atgttgaccgagctggagaaagccttgaactctatcatcgacgtctaccacaagtactccctgataaaggggaatttccatgccgtctacagggatgacctgaagaaattgctagagaccgagtgtcctcagtatatcaggaaaaagggtgcagacgtctggttcaaagagttggatatcaacactgatggtgcagttaacttccaggagttcctcattctggtgataaagatgggcgtggcagcccacaaaaaaagccatgaagaaagccacaaagag

SEQ ID NO: 5076 - DNA, 402 bp, Homo Sapiens
tcaactcccctgatgtcctggccttggtctccctctgctctgcgcctgctgcagaggcctccggaggaaccggctgcccatgccaactgccacagagtagcactgaacatctccttccaggagctgggctgggaacggtggatcgtgtaccctcccagtttcatcttccactactgtcatggtggttgtgggctgcacatcccaccaaacctgtcccttccagtccctggggctccccctaccccagcccagccctactccttgctgccaggggcccagccctgctgtgctgctctcccagggaccatgaggcccctacatgtccgcaccacctcggatggaggttactctttcaagtatgagacagtgcccaaccttctcacgcagcactgtgcttgtatc

SEQ ID NO: 5077 - DNA, 1245 bp, Homo Sapiens
atggaggatctttgtgtggcaaacacactctttgccctcaatttattcaagcatctggcaaaagcaagccccacccagaacctcttcctctccccatggagcatctcgtccaccatggccatggtctacatgggctccaggggcagcaccgaagaccagatggccaaggtgcttcagtttaatgaagtgggagccaatgcagttacccccatgactccagagaactttaccagctgtgggttcatgcagcagatccagaagggtagttatcctgatgcgattttgcaggcacaagctgcagataaaatccattcatccttccgctctctcagctctgcaatcaatgcatccacagggaattatttactggaaagtgtcaataagctgtttggtgagaagtctgcgagcttccgggaagaatatattcgactctgtcagaaatattactcctcagaaccccaggcagtagacttcctagaatgtgcagaagaagctagaaaaaagatttattcctgggtcaagactcaaaccaaaggcaaaatcccaaacttgttacctgaaggttctgtagatggggataccaggatggtcctggtgaatgctgtctacttcaaaggaaagtggaaaactccatttgagaagaaactaaatgggctttatcctttccgtgtaaactcggctcagcgcacacctgtacagatgatgtacttgcgtgaaaagctaaacattggatacatagaagacctaaaggctcagattctagaactcccatatgctggagatgttagcatgttcttgttgcttccagatgaaattgccgatgtgtccactggcttggagctgctggaaagtgaaataacctatgacaaactcaacaagtggaccagcaaagacaaaatggctgaagatgaagttgaggtatacataccccagttcaaattagaagagcattatgaactcagatccattctgagaagcatgggcatggaggacgccttcaacaagggacgggccaatttctcagggatgtcggagaggaatgacctgtttctttctgaagtgttccaccaagccatggtggatgtgaatgaggagggcactgaagcagccgctggcacaggaggtgttatgacagggagaactggacatggaggcccacagtttgtggcagatcatccttttctttttcttattatgcataagataaccaactgcattttatttttcggcagattttcctcaccc

SEQ ID NO: 5078 - DNA, 1137 bp, Homo Sapiens
gtgcaccatcccccatcctacgtggcccacctggcctcagacttcggggtgagggtgtttcagcaggtggcgcaggcctccaaggaccgcaacgtggttttctcaccctatggggtggcctcggtgttggccatgctccagctgacaacaggaggagaaacccagcagcagattcaagcagctatgggattcaagattgatgacaagggcatggcccccgccctccggcatctgtacaaggagctcatggggccatggaacaaggatgagatcagcaccacagacgcgatcttcgtccagcgggatctgaagctggtccagggcttcatgccccacttcttcaggctgttccggagcacggtcaagcaagtggacttttcagaggtggagagagccagattcatcatcaatgactgggtgaagacacacacaaaaggtatgatcagcaacttgcttgggaaaggagccgtggaccagctgacacggctggtgctggtgaatgccctctacttcaacggccagtggaagactcccttccccgactccagcacccaccgccgcctcttccacaaatcagacggcagcactgtctctgtgcccatgatggctcagaccaacaagttcaactatactgagttcaccacgcccgatggccattactacgacatcctggaactgccctaccacggggacaccctcagcatgttcattgctgccccttatgaaaaagaggtgcctctctctgccctcaccaacattctgagtgcccagctcatcagccactggaaaggcaacatgaccaggctgccccgcctcctggttctgcccaagttctccctggagactgaagtcgacctcaggaagcccctagagaacctgggaatgaccgacatgttcagacagtttcaggctgacttcacgagtctttcagaccaagagcctctccacgtcgcgcaggcgctgcagaaagtgaagatcgaggtgaacgagagtggcacggtggcctcctcatccacagctgtcatagtctcagcccgcatggcccccgaggagatcatcatggacagacccttcctctttgtggtccggcacaaccccacaggaacagtccttttcatgggccaagtgatggaaccc

SEQ ID NO: 5079 - DNA, 1143 bp, Homo Sapiens
gagatgaagaagagagtcgaggacctccatgtaggtgccacggtggcccccagcagcagaagggactttacctttgacctctacagggccttggcttccgctgcccccagccagaacatcttcttctcccctgtgagcatctccatgagcctggccatgctctccctgggggctgggtccagcacaaagatgcagatcctggagggcctgggcctcaacctccagaaaagctcagagaaggagctgcacagaggctttcagcagctccttcaggaactcaaccagcccagagatggcttccagctgagcctcggcaatgcccttttcaccgacctggtggtagacctgcaggacaccttcgtaagtgccatgaagacgctgtacctggcagacactttccccaccaactttagggactctgcaggggccatgaagcagatcaatgattatgtggcaaagcaaacgaagggcaagattgtggacttgcttaagaacctcgatagcaatgcggtcgtgatcatggtgaattacatcttctttaaagctaagtgggagacaagcttcaaccacaaaggcacccaagagcaagacttctacgtgacctcggagactgtggtgcgggtacccatgatgagccgcgaggatcagtatcactacctcctggaccggaacctctcctgcagggtggtgggggtcccctaccaaggcaatgccacggctttgttcattctccccagtgagggaaagatgcagcaggtggagaatggactgagtgagaaaacgctgaggaagtggcttaagatgttcaaaaagaggcagctcgagctttaccttcccaaattctccattgagggctcctatcagctggagaaagtcctccccagtctggggatcagtaacgtcttcacctcccatgctgatctgtccggcatcagcaaccactcaaatatccaggtgtctgagatggtgcacaaagctgtggtggaggtggacgagtcgggaaccagagcagcggcagccacggggacaatcttcactttcaggtcggcccgcctgaactctcagaggctagtgttcaacaggccctttctgatgttcattgtggataacaacatcctcttccttggcaaagtgaaccgcccc

SEQ ID NO: 5080 - DNA, 1434 bp, Homo Sapiens
aatccaaatgctaccagctccagctcccaggatccagagagtttgcaagacagaggcgaagggaaggtcgcaacaacagttatctccaagatgctattcgttgaacccatcctggaggtttccagcttgccgacaaccaactcaacaaccaattcagccaccaaaataacagctaataccactgatgaacccaccacacaacccaccacagagcccaccacccaacccaccatccaacccacccaaccaactacccagctcccaacagattctcctacccagcccactactgggtccttctgcccaggacctgttactctctgctctgacttggagagtcattcaacagaggccgtgttgggggatgctttggtagatttctccctgaagctctaccacgccttctcagcaatgaagaaggtggagaccaacatggccttttccccattcagcatcgccagcctccttacccaggtcctgctcggggctggggagaacaccaaaacaaacctggagagcatcctctcttaccccaaggacttcacctgtgtccaccaggccctgaagggcttcacgaccaaaggtgtcacctcagtctctcagatcttccacagcccagacctggccataagggacacctttgtgaatgcctctcggaccctgtacagcagcagccccagagtcctaagcaacaacagtgacgccaacttggagctcatcaacacctgggtggccaagaacaccaacaacaagatcagccggctgctagacagtctgccctccgatacccgccttgtcctcctcaatgctatctacctgagtgccaagtggaagacaacatttgatcccaagaaaaccagaatggaaccctttcacttcaaaaactcagttataaaagtgcccatgatgaatagcaagaagtaccctgtggcccatttcattgaccaaactttgaaagccaaggtggggcagctgcagctctcccacaatctgagtttggtgatcctggtaccccagaacctgaaacatcgtcttgaagacatggaacaggctctcagcccttctgttttcaaggccatcatggagaaactggagatgtccaagttccagcccactctcctaacactaccccgcatcaaagtgacgaccagccaggatatgctctcaatcatggagaaattggaattcttcgatttttcttatgaccttaacctgtgtgggctgacagaggacccagatcttcaggtttctgcgatgcagcaccagacagtgctggaactgacagagactggggtggaggcggctgcagcctccgccatctctgtggcccgcaccctgctggtctttgaagtgcagcagcccttcctcttcatgctctgggaccagcagcacaagttccctgtcttcatggggcgagtatatgaccccagggcc

SEQ ID NO: 5081 - DNA, 1923 bp, Homo Sapiens
gaagagaaaccctgtggttttcctcatgtggaaaatggaagaattgcccaatattactatacttttaaaagcttttactttccaatgagcatagacaaaaaattgtcatttttctgcttggctggttataccactgaaagtggaagacaagaagagcaaaccacgtgtacaacagaaggctggtctccagagccaaggtgcttcaaaaaatgcactaagcctgacctgagtaatggttacatctctgatgtaaagttattgtataaaattcaagagaacatgcgttatggttgcgcttcagggtacaaaaccactggagggaaggatgaagaagtggttcaatgtctctctgatggatggtcttctcaaccaacctgtaggaaagaacatgaaacatgtttggctcctgaattatataatggaaattattccacaacacagaaaacattcaaagtgaaggacaaagtacaatacgaatgtgctactggctactacacagctggaggaaagaagacagaggaggtagaatgtctcacatacggatggtctctcacaccaaaatgtaccaaattaaagtgctcttctttaagattaattgaaaatggttattttcatcctgtaaagcaaacctatgaagaaggagatgtcgttcagtttttctgtcatgaaaattattatctaagtggatctgatttaattcaatgctataactttggttggtacccagaatctcctgtatgcgaaggaagaagaaacagatgtcctcctccacctctgcccataaactccaaaattcaaacacattcaacaacttatcgtcatggagaaatagttcatatagaatgtgaacttaattttgagatccatgggtcagcagaaatacgttgtgaagatggaaaatggacagaacctccaaaatgcattgaaggacaggagaaggtagcctgtgaggaaccacccttcattgaaaatggtgcagcaaatttacactctaagatttattacaatggggataaagtgacatatgcatgtaaaagcggctaccttctccatggatcgaatgagataacttgtaatcgtggaaaatggacacttcctcctgagtgtgttgaaaataatgagaattgtaagcatcctcctgttgtaatgaatggggctgttgcagacgggatattggcaagctatgcaacaggatcctcagtggaatatagatgcaatgaatattacttactgaggggatcaaaaatatctcgttgcgaacaaggaaaatggtcatccccacctgtttgcttggaaccatgtactgttaatgtggattacatgaacagaaataacatagaaatgaagtggaaatatgaagggaaagtcttacatggagatttaatagattttgtatgtaaacagggatatgacttatctccattaaccccattgtctgaattatctgtgcagtgcaacagaggagaagtgaaatatcctttatgtactagaaaagaatctaaaggaatgtgcacatctcctcctcttattaaacatggagtcattattagttcaacagtagacacctatgaaaatggctcttcagtagaatacagatgttttgatcaccatttcctagaaggatctagggaggcctattgtttagatggaatgtggactacaccaccattgtgtttagagccatgcacattatcttttactgaaatggaaaagaataatttacttctgaaatgggattttgacaatagaccacacattttgcatggtgaatatattgagtttatttgtagaggagatacttatccagctgaattatatattactggatctatacttagaatgcaatgtgacagagggcagttaaaatatccaagatgtattccaagacaaagcactctgtcttatcaagaacccttaagaaca

SEQ ID NO: 5082 - DNA, 1743 bp, Homo Sapiens
gtgacttgcccggagcaggacaaataccgcaccatcaccgggatgtgcaacaacagacgcagccccacgctgggggcctccaaccgtgcctttgtgcgctggctgccggcggagtatgaggacggcttctctcttccctacggctggacgcccggggtcaagcgcaacggcttcccggtggctctggctcgcgcggtctccaacgagatcgtgcgcttccccactgatcagctgactccggaccaggagcgctcactcatgttcatgcaatggggccagctgttggaccacgacctcgacttcacccctgagccggccgcccgggcctccttcgtcactggcgtcaactgcgagaccagctgcgttcagcagccgccctgcttcccgctcaagatcccgcccaatgacccccgcatcaagaaccaagccgactgcatcccgttcttccgctcctgcccggcttgccccgggagcaacatcaccatccgcaaccagatcaacgcgctcacttccttcgtggacgccagcatggtgtacggcagcgaggagcccctggccaggaacctgcgcaacatgtccaaccagctggggctgctggccgtcaaccagcgcttccaagacaacggccgggccctgctgccctttgacaacctgcacgatgacccctgtctcctcaccaaccgctcagcgcgcatcccctgcttcctggcaggggacacccgttccagtgagatgcccgagctcacctccatgcacaccctcttacttcgggagcacaaccggctggccacagagctcaagagcctgaaccctaggtgggatggggagaggctctaccaggaagcccggaagatcgtgggggccatggtccagatcatcacttaccgggactacctgcccctggtgctggggccaacggccatgaggaagtacctgcccacgtaccgttcctacaatgactcagtggacccacgcatcgccaacgtcttcaccaatgccttccgctacggccacaccctcatccaacccttcatgttccgcctggacaatcggtaccagcccatggaacccaacccccgtgtccccctcagcagggtcttttttgcctcctggagggtcgtgctggaaggtggcattgaccccatcctccggggcctcatggccacccctgccaagctgaatcgtcagaaccaaattgcagtggatgagatccgggagcgattgtttgagcaggtcatgaggattgggctggacctgcctgctctgaacatgcagcgcagcagggaccacggcctcccaggatacaatgcctggaggcgcttctgtgggctcccgcagcctgaaactgtgggccagctgggcacggtgctgaggaacctgaaattggcgaggaaactgatggagcagtatggcacgcccaacaacatcgacatctggatgggcggcgtgtccgagcctctgaagcgcaaaggccgcgtgggcccactcctcgcctgcatcatcggtacccagttcaggaagctccgggatggtgatcggttttggtgggagaacgagggtgtgttcagcatgcagcagcgacaggccctggcccagatctcattgccccggatcatctgcgacaacacaggcatcaccaccgtgtctaagaacaacatcttcatgtccaactcatatccccgggactttgtcaactgcagtacacttcctgcattgaacctggcttcctggagggaagcctcc

SEQ ID NO: 5083 - DNA, 1452 bp, Homo Sapiens
ttagtgccagagaaagagaaagaccccaagtactggcgagaccaagcgcaagagacactgaaatatgccctggagcttcagaagctcaacaccaacgtggctaagaatgtcatcatgttcctgggagatgggatgggtgtctccacagtgacggctgcccgcatcctcaagggtcagctccaccacaaccctggggaggagaccaggctggagatggacaagttccccttcgtggccctctccaagacgtacaacaccaatgcccaggtccctgacagcgccggcaccgccaccgcctacctgtgtggggtgaaggccaatgagggcaccgtgggggtaagcgcagccactgagcgttcccggtgcaacaccacccaggggaacgaggtcacctccatcctgcgctgggccaaggacgctgggaaatctgtgggcattgtgaccaccacgagagtgaaccatgccacccccagcgccgcctacgcccactcggctgaccgggactggtactcagacaacgagatgccccctgaggccttgagccagggctgtaaggacatcgcctaccagctcatgcataacatcagggacattgacgtgatcatggggggtggccggaaatacatgtaccccaagaataaaactgatgtggagtatgagagtgacgagaaagccaggggcacgaggctggacggcctggacctcgttgacacctggaagagcttcaaaccgagacacaagcactcccacttcatctggaaccgcacggaactcctgacccttgacccccacaatgtggactacctattgggtctcttcgagccgggggacatgcagtacgagctgaacaggaacaacgtgacggacccgtcactctccgagatggtggtggtggccatccagatcctgcggaagaaccccaaaggcttcttcttgctggtggaaggaggcagaattgaccacgggcaccatgaaggaaaagccaagcaggccctgcatgaggcggtggagatggaccgggccatcgggcaggcaggcagcttgacctcctcggaagacactctgaccgtggtcactgcggaccattcccacgtcttcacatttggtggatacaccccccgtggcaactctatctttggtctggcccccatgctgagtgacacagacaagaagcccttcactgccatcctgtatggcaatgggcctggctacaaggtggtgggcggtgaacgagagaatgtctccatggtggactatgctcacaacaactaccaggcgcagtctgctgtgcccctgcgccacgagacccacggcggggaggacgtggccgtcttctccaagggccccatggcgcacctgctgcacggcgtccacgagcagaactacgtcccccacgtgatggcgtatgcagcctgcatcggggccaacctcggccactgtgctcctgccagc

SEQ ID NO: 5084 - DNA, 1452 bp, Homo Sapiens
atcatcccagttgaggaggagaacccggacttctggaaccgccaggcagccgaggccctgggtgccgccaagaagctgcagcctgcacagacagccgccaagaacctcatcatcttcctgggtgacgggatgggggtgtctacggtgacagctgccaggatcctaaaagggcagaagaaggacaaactggggcctgagaccttcctggccatggaccgcttcccgtacgtggctctgtccaagacatacagtgtagacaagcatgtgccagacagtggagccacagccacggcctacctgtgcggggtcaagggcaacttccagaccattggcttgagtgcagccgcccgctttaaccagtgcaacacgacacgcggcaacgaggtcatctccgtgatgaatcgggccaagaaagcaggaaagtcagtgggagtggtaaccaccacacgggtgcagcatgcctcgccagccggcgcctacgcccacacggtgaaccgcaactggtactcggatgccgacgtgcctgcctcggcccgccaggaggggtgccaggacatcgccacgcagctcatctccaacatggacattgatgtgatcctaggtggaggccgaaagtacatgtttcccatggggaccccagaccctgagtacccagatgactacagccaaggtgggaccaggctggacgggaagaatctggtgcaggaatggctggcgaagcgccagggtgcccggtacgtgtggaaccgcactgagctcatgcaggcttccctggacccgtctgtgacccatctcatgggtctctttgagcctggagacatgaaatacgagatccaccgagactccacactggacccctccctgatggagatgacagaggctgccctgcgcctgctgagcaggaacccccgcggcttcttcctcttcgtggagggtggtcgcatcgaccatggtcatcatgaaagcagggcttaccgggcactgactgagacgatcatgttcgacgacgccattgagagggcgggccagctcaccagcgaggaggacacgctgagcctcgtcactgccgaccactcccacgtcttctccttcggaggctaccccctgcgagggagctccatcttcgggctggcccctggcaaggcccgggacaggaaggcctacacggtcctcctatacggaaacggtccaggctatgtgctcaaggacggcgcccggccggatgttaccgagagcgagagcgggagccccgagtatcggcagcagtcagcagtgcccctggacggagagacccacgcaggcgaggacgtggcggtgttcgcgcgcggcccgcaggcgcacctggttcacggcgtgcaggagcagaccttcatagcgcacgtcatggccttcgccgcctgcctggagccctacaccgcctgcgacctggcgccccgcgccggcaccaccgac

SEQ ID NO: 5085 - DNA, 555 bp, Homo Sapiens
tacagcccccggacccctgaccgggtctcagaagcagatatccagaggctgcttcatggtgttatggagcaattgggcattgccaggccccgagtggaatatccagctcaccaggccatgaatcttgtgggcccccagagcattgaaggtggagctcatgaaggacttcagcatttgggtccttttggcaacatccccaacatcgtggcagagttgactggagacaacattcctaaggactttagtgaggatcaggggtacccagaccctccaaatccctgtcctgttggaaaaacagatgatggatgtctagaaaacacccctgacactgcagagttcagtcgagagttccagttgcaccagcatctctttgatccggaacatgactatccaggcttgggcaagtggaacaagaaactcctttacgagaagatgaagggaggagagagacgaaagcggaggagtgtcaatccatatctacaaggacagagactggataatgttgttgcaaagaagtctgtcccccatttttcagatgaggataaggatccagag

SEQ ID NO: 5086 - DNA, 1185 bp, Homo Sapiens
gcatcacctgaaggcaaagtaacagcctgccattcatcccaaccaaatgccactctctacaagatgtcatccattaatgctgactttgcattcaatctgtaccggaggttcactgtggagaccccagataagaacatcttcttttcccctgtgagcatttctgcagctttggttatgctttcctttggggcctgctgcagcacccaaactgagattgtggagaccttggggttcaacctcacagacactccaatggtagagatccagcatggcttccagcatctgatctgttcactgaattttccaaagaaggaactggaattgcagataggaaatgccctcttcattggcaagcatctgaaaccactggcaaagttcttgaatgatgtcaagaccctctatgagactgaagtcttttctaccgacttctccaacatttctgcagccaagcaggagattaacagtcatgtggagatgcaaaccaaagggaaagttgtgggtctaattcaagacctcaagccaaacaccatcatggtcttagtgaactatattcactttaaagcccagtgggcaaatccttttgatccatccaagacagaagacagttccagcttcttaatagacaagaccaccactgttcaagtgcccatgatgcaccagatggaacaatactatcacctagtggatatggaattgaactgcacagttctgcaaatggactacagcaagaatgctctggcactctttgttcttcccaaggagggacagatggagtcagtggaagctgccatgtcatctaaaacactgaagaagtggaaccgcttactacagaagggatgggttgacttgtttgttccaaagttttccatttctgccacatatgaccttggagccacacttttgaagatgggcattcagcatgcctattctgaaaatgctgatttttctggactcacagaggacaatggtctgaaactttccaatgctgcccataaggctgtgctgcacattggtgaaaagggaactgaagctgcagctgtccctgaagttgaactttcggatcagcctgaaaacactttcctacaccctattatccaaattgatagatctttcatgttgttgattttggagagaagcacaaggagtattctctttctagggaaagttgtgaacccaacggaagcg

SEQ ID NO: 5087 - DNA, 1440 bp, Homo Sapiens
gggagcaaaggcccgctggatcagctagagaaaggaggggaaactgctcagtctgcagatccccagtgggagcagttaaataacaaaaacctgagcatgcctcttctccctgccgacttccacaaggaaaacaccgtcaccaacgactggattccagagggggaggaggacgacgactatctggacctggagaagatattcagtgaagacgacgactacatcgacatcgtcgacagtctgtcagtttccccgacagactctgatgtgagtgctgggaacatcctccagctttttcatggcaagagccggatccagcgtcttaacatcctcaacgccaagttcgctttcaacctctaccgagtgctgaaagaccaggtcaacactttcgataacatcttcatagcacccgttggcatttctactgcgatgggtatgatttccttaggtctgaagggagagacccatgaacaagtgcactcgattttgcattttaaagactttgttaatgccagcagcaagtatgaaatcacgaccattcataatctcttccgtaagctgactcatcgcctcttcaggaggaattttgggtacacactgcggtcagtcaatgacctttatatccagaagcagtttccaatcctgcttgacttcaaaactaaagtaagagagtattactttgctgaggcccagatagctgacttctcagaccctgccttcatatcaaaaaccaacaaccacatcatgaagctcaccaagggcctcataaaagatgctctggagaatatagaccctgctacccagatgatgattctcaactgcatctacttcaaaggatcctgggtgaataaattcccagtggaaatgacacacaaccacaacttccggctgaatgagagagaggtagttaaggtttccatgatgcagaccaaggggaacttcctcgcagcaaatgaccaggagctggactgcgacatcctccagctggaatacgtggggggcatcagcatgctaattgtggtcccacacaagatgtctgggatgaagaccctcgaagcgcaactgacaccccgggtggtggagagatggcaaaaaagcatgacaaacagaactcgagaagtgcttctgccgaaattcaagctggagaagaactacaatctagtggagtccctgaagttgatggggatcaggatgctgtttgacaaaaatggcaacatggcaggcatctcagaccaaaggatcgccatcgacctgttcaagcaccaaggcacgatcacagtgaacgaggaaggcacccaagccaccactgtgaccacggtggggttcatgccgctgtccacccaagtccgcttcactgtcgaccgcccctttcttttcctcatctacgagcatcgcaccagctgcctgctcttcatgggaagagtggccaaccccagcaggtcc

SEQ ID NO: 5088 - DNA, 633 bp, Homo Sapiens
agggagaccatagaaagcctttcaagcagtgaggaatctattacagaatacaagcagaaagttgagaaggttaaacatgaggaccagcagcaaggagaggatgaacaccaggataaaatctacccctctttccagccacagcctctgatctatccattcgttgaacctatcccctatggttttcttccacaaaacattctgcctcttgctcagcctgctgtggtgctgcctgtccctcagcctgaaataatggaagtccctaaagctaaagacactgtctacactaagggcagagtgatgcctgtccttaaatctccaacgatacccttttttgaccctcaaatcccaaaactcactgatcttgaaaatctgcatcttcctctgcctctgctccagcccttgatgcagcaggtccctcagcctattcctcagactcttgcacttccccctcagcccctgtggtctgttcctcagcccaaagtcctgcctatcccccagcaagtggtgccctaccctcagagagctgtgcctgttcaagcccttctgctcaaccaagaacttctacttaaccccacccaccagatctaccctgtgactcagccacttgccccagttcataaccccattagtgtc

SEQ ID NO: 5089 - DNA, 1119 bp, Homo Sapiens
aggagtgaccaggagccgctgtacccagtgcaggtcagctctgcggacgctcggctcatggtctttgacaagacggaagggacgtggcggctgctgtgctcctcgcgctccaacgccagggtagccggactcagctgcgaggagatgggcttcctcagggcactgacccactccgagctggacgtgcgaacggcgggcgccaatggcacgtcgggcttcttctgtgtggacgaggggaggctgccccacacccagaggctgctggaggtcatctccgtgtgtgattgccccagaggccgtttcttggccgccatctgccaagactgtggccgcaggaagctgcccgtggaccgcatcgtgggaggccgggacaccagcttgggccggtggccgtggcaagtcagccttcgctatgatggagcacacctctgtgggggatccctgctctccggggactgggtgctgacagccgcccattgcttcccggagcggaaccgggtcctgtcccgatggcgagtgtttgccggtgccgtggcccaggcctctccccacggtctgcagctgggggtgcaggctgtggtctaccacgggggctatcttccctttcgggaccccaacagcgaggagaacagcaacgatattgccctggtccacctctccagtcccctgcccctcacagaatacatccagcctgtgtgcctcccagctgccggccaggccctggtggatggcaagatctgtaccgtgacgggctggggcaacacgcagtactatggccaacaggccggggtactccaggaggctcgagtccccataatcagcaatgatgtctgcaatggcgctgacttctatggaaaccagatcaagcccaagatgttctgtgctggctaccccgagggtggcattgatgcctgccagggcgacagcggtggtccctttgtgtgtgaggacagcatctctcggacgccacgttggcggctgtgtggcattgtgagttggggcactggctgtgccctggcccagaagccaggcgtctacaccaaagtcagtgacttccgggagtggatcttccaggccataaagactcactccgaagccagcggcatggtgacccagctc

SEQ ID NO: 5090 - DNA, 1407 bp, Homo Sapiens
ggaaaggtgctggtgtggcccacagaattcagccactggatgaatataaagacaatcctggatgaacttgtccagagaggtcatgaggtgactgtattggcatcttcagcttccatttctttcgatcccaacagcccatctactcttaaatttgaagtttatcctgtatctttaactaaaactgagtttgaggatattatcaagcagctggttaagagatgggcagaacttccaaaagacacattttggtcatatttttcacaagtacaagaaatcatgtggacatttaatgacatacttagaaagttctgtaaggatatagtttcaaataagaaacttatgaagaaactacaggagtcaagatttgatgttgttcttgcagatgctgttttcccctttggtgagctgctggccgagttacttaaaataccctttgtctacagcctccgcttctctcctggctacgcaattgaaaagcatagtggaggacttctgttccctccttcctatgtgcctgttgttatgtcagaactaagtgaccaaatgactttcatagagagggtaaaaaatatgatctatgtgctttattttgaattttggttccaaatatttgacatgaagaagtgggatcagttctacagtgaagttctaggaagacccactacgttatctgagacaatggcaaaagctgacatatggcttattcgaaactactgggattttcaatttcctcacccactcttaccaaatgttgagttcgttggaggactccactgcaaacctgccaaacccctaccgaaggaaatggaagagtttgtccagagctctggagaaaatggtgttgtggtgttttctctggggtcgatggtcagtaacacgtcagaagaaagggccaatgtaattgcatcagcccttgccaagatcccacaaaaggttctgtggagatttgatgggaataaaccagatactttaggactcaatactcggctgtacaagtggataccccagaatgatcttcttggtcacccaaaaaccagagcttttataactcatggtggagccaatggcatctatgaggcaatctaccatggaatccctatggtgggcgttccattgtttgcagatcaacctgataacattgcacacatgaaggccaagggagcagctgttagtttggacttccacacaatgtcgagtactgacttactcaatgcactgaagacagtaattaatgatcctttatataaagagaatgctatgaaattatcaagaattcatcatgatcaaccagtgaagccccttgatcgagcagtcttctggattgaatttgtcatgcgccataaaggagccaagcaccttcgggttgcagcccacgacctcacctggttccagtaccactctttggat

SEQ ID NO: 5091 - DNA, 1722 bp, Homo Sapiens
gaagatgacatcataattgcaacaaagaatggaaaagtcagagggatgaacttgacagtttttggtggcacggtaacagcctttcttggaattccctatgcacagccacctcttggtagacttcgattcaaaaagccacagtctctgaccaagtggtctgatatttggaatgccacaaaatatgcaaattcttgctgtcagaacatagatcaaagttttccaggcttccatggatcagagatgtggaacccaaacactgacctcagtgaagactgtttatatctaaatgtatggattccagcacctaaaccaaaaaatgccactgtattgatatggatttatggtggtggttttcaaactggaacatcatctttacatgtttatgatggcaagtttctggctcgggttgaaagagttattgtagtgtcaatgaactatagggtgggtgccctaggattcttagctttgccaggaaatcctgaggctccagggaacatgggtttatttgatcaacagttggctcttcagtgggttcaaaaaaatatagcagcctttggtggaaatcctaaaagtgtaactctctttggagaaagtgcaggagcagcttcagttagcctgcatttgctttctcctggaagccattcattgttcaccagagccattctgcaaagtggatcctttaatgctccttgggcggtaacatctctttatgaagctaggaacagaacgttgaacttagctaaattgactggttgctctagagagaatgagactgaaataatcaagtgtcttagaaataaagatccccaagaaattcttctgaatgaagcatttgttgtcccctatgggactcctttgtcagtaaactttggtccgaccgtggatggtgattttctcactgacatgccagacatattacttgaacttggacaatttaaaaaaacccagattttggtgggtgttaataaagatgaagggacagcttttttagtctatggtgctcctggcttcagcaaagataacaatagtatcataactagaaaagaatttcaggaaggtttaaaaatattttttccaggagtgagtgagtttggaaaggaatccatcctttttcattacacagactgggtagatgatcagagacctgaaaactaccgtgaggccttgggtgatgttgttggggattataatttcatatgccctgccttggagttcaccaagaagttctcagaatggggaaataatgcctttttctactattttgaacaccgatcctccaaacttccgtggccagaatggatgggagtgatgcatggctatgaaattgaatttgtctttggtttacctctggaaagaagagataattacacaaaagccgaggaaattttgagtagatccatagtgaaacggtgggcaaattttgcaaaatatgggaatccaaatgagactcagaacaatagcacaagctggcctgtcttcaaaagcactgaacaaaaatatctaaccttgaatacagagtcaacaagaataatgacgaaactacgtgctcaacaatgtcgattctggacatcattttttccaaaagtcttggaaatgacaggaaatattgatgaagcagaatgggagtggaaagcaggattccatcgctggaacaattacatgatggactggaaaaatcaatttaacgattacactagcaagaaagaaagttgtgtgggtctc

SEQ ID NO: 5092 - DNA, 1194 bp, Homo Sapiens
ctggacaatggattggcaaggacgcctaccatgggctggctgcactgggagcgcttcatgtgcaaccttgactgccaggaagagccagattcctgcatcagtgagaagctcttcatggagatggcagagctcatggtctcagaaggctggaaggatgcaggttatgagtacctctgcattgatgactgttggatggctccccaaagagattcagaaggcagacttcaggcagaccctcagcgctttcctcatgggattcgccagctagctaattatgttcacagcaaaggactgaagctagggatttatgcagatgttggaaataaaacctgcgcaggcttccctgggagttttggatactacgacattgatgcccagacctttgctgactggggagtagatctgctaaaatttgatggttgttactgtgacagtttggaaaatttggcagatggttataagcacatgtccttggccctgaataggactggcagaagcattgtgtactcctgtgagtggcctctttatatgtggccctttcaaaagcccaattatacagaaatccgacagtactgcaatcactggcgaaattttgctgacattgatgattcctggaaaagtataaagagtatcttggactggacatcttttaaccaggagagaattgttgatgttgctggaccagggggttggaatgacccagatatgttagtgattggcaactttggcctcagctggaatcagcaagtaactcagatggccctctgggctatcatggctgctcctttattcatgtctaatgacctccgacacatcagccctcaagccaaagctctccttcaggataaggacgtaattgccatcaatcaggaccccttgggcaagcaagggtaccagcttagacagggagacaactttgaagtgtgggaacgacctctctcaggcttagcctgggctgtagctatgataaaccggcaggagattggtggacctcgctcttataccatcgcagttgcttccctgggtaaaggagtggcctgtaatcctgcctgcttcatcacacagctcctccctgtgaaaaggaagctagggttctatgaatggacttcaaggttaagaagtcacataaatcccacaggcactgttttgcttcagctagaaaatacaatgcagatgtcattaaaagacttactt

SEQ ID NO: 5093 - DNA, 174 bp, Homo Sapiens
gtatcgcagagaacggatggcgagtcccgagcgcacctgggcgccctgctggcaagatacatccagcaggcccggaaagctccttctggacgaatgtccatcgttaagaacctgcagaacctggaccccagccacaggataagtgaccgggactacatgggctggatggatttt

SEQ ID NO: 5094 - DNA, 2265 bp, Homo Sapiens
gccactgcgtcgcggggggcgtcccaggcgggggcgccccaggggcgggtgcccgaggcgcggcccaacagcatggtggtggaacaccccgagttcctcaaggcagggaaggagcctggcctgcagatctggcgtgtggagaagttcgatctggtgcccgtgcccaccaacctttatggagacttcttcacgggcgacgcctacgtcatcctgaagacagtgcagctgaggaacggaaatctgcagtatgacctccactactggctgggcaatgagtgcagccaggatgagagcggggcggccgccatctttaccgtgcagctggatgactacctgaacggccgggccgtgcagcaccgtgaggtccagggcttcgagtcggccaccttcctaggctacttcaagtctggcctgaagtacaagaaaggaggtgtggcatcaggattcaagcacgtggtacccaacgaggtggtggtgcagagactcttccaggtcaaagggcggcgtgtggtccgtgccaccgaggtacctgtgtcctgggagagcttcaacaatggcgactgcttcatcctggacctgggcaacaacatccaccagtggtgtggttccaacagcaatcggtatgaaagactgaaggccacacaggtgtccaagggcatccgggacaacgagcggagtggccgggcccgagtgcacgtgtctgaggagggcactgagcccgaggcgatgctccaggtgctgggccccaagccggctctgcctgcaggtaccgaggacaccgccaaggaggatgcggccaaccgcaagctggccaagctctacaaggtctccaatggtgcagggaccatgtccgtctccctcgtggctgatgagaaccccttcgcccagggggccctgaagtcagaggactgcttcatcctggaccacggcaaagatgggaaaatctttgtctggaaaggcaagcaggcaaacacggaggagaggaaggctgccctcaaaacagcctctgacttcatcaccaagatggactaccccaagcagactcaggtctcggtccttcctgagggcggtgagaccccactgttcaagcagttcttcaagaactggcgggacccagaccagacagatggcctgggcttgtcctacctttccagccatatcgccaacgtggagcgggtgcccttcgacgccgccaccctgcacacctccactgccatggccgcccagcacggcatggatgacgatggcacaggccagaaacagatctggagaatcgaaggttccaacaaggtgcccgtggaccctgccacatatggacagttctatggaggcgacagctacatcattctgtacaactaccgccatggtggccgccaggggcagataatctataactggcagggtgcccagtctacccaggatgaggtcgctgcatctgccatcctgactgctcagctggatgaggagctgggaggtacccctgtccagagccgtgtggtccaaggcaaggagcccgcccacctcatgagcctgtttggtgggaagcccatgatcatctacaagggcggcacctcccgcgagggcgggcagacagcccctgccagcacccgcctcttccaggtccgcgccaacagcgctggagccacccgggctgttgaggtattgcctaaggctggtgcactgaactccaacgatgcctttgttctgaaaaccccctcagccgcctacctgtgggtgggtacaggagccagcgaggcagagaagacgggggcccaggagctgctcagggtgctgcgggcccaacctgtgcaggtggcagaaggcagcgagccagatggcttctgggaggccctgggcgggaaggctgcctaccgcacatccccacggctgaaggacaagaagatggatgcccatcctcctcgcctctttgcctgctccaacaagattggacgttttgtgatcgaagaggttcctggtgagctcatgcaggaagacctggcaacggatgacgtcatgcttctggacacctgggaccaggtctttgtctgggttggaaaggattctcaagaagaagaaaagacagaagccttgacttctgctaagcggtacatcgagacggacccagccaatcgggatcggcggacgcccatcaccgtggtgaagcaaggctttgagcctccctcctttgtgggctggttccttggctgggatgatgattactggtctgtggaccccttggacagggccatggctgagctggctgcc

SEQ ID NO: 5095 - DNA, 1527 bp, Homo Sapiens
aaaatccaaatccagcgctctggtcatctgaacctctacctgctcctggactgttcgcagagtgtgtcggaaaatgactttctcatcttcaaggagagcgcctccctcatggtggacaggatcttcagctttgagatcaatgtgagcgttgccattatcacctttgcctcagagcccaaagtcctcatgtctgtcctgaacgacaactcccgggatatgactgaggtgatcagcagcctggaaaatgccaactataaagatcatgaaaatggaactgggactaacacctatgcggccttaaacagtgtctatctcatgatgaacaaccaaatgcgactcctcggcatggaaacgatggcctggcaggaaatccgacatgccatcatccttctgacagatggaaagtccaatatgggtggctctcccaagacagctgttgaccatatcagagagatcctgaacatcaaccagaagaggaatgactatctggacatctatgccatcggggtgggcaagctggatgtggactggagagaactgaatgagctagggtccaagaaggatggtgagaggcatgccttcattctgcaggacacaaaggctctgcaccaggtctttgaacatatgctggatgtctccaagctcacagacaccatctgcggggtggggaacatgtcagcaaacgcctctgaccaggagaggacaccctggcatgtcactattaagcccaagagccaagagacctgccggggggccctcatctccgaccaatgggtcctgacagcagctcattgcttccgcgatggcaacgaccactccctgtggagggtcaatgtgggagaccccaaatcccagtggggcaaagaattccttattgagaaggcggtgatctccccagggtttgatgtctttgccaaaaagaaccagggaatcctggagttctatggtgatgacatagctctgctgaagctggcccagaaagtaaagatgtccacccatgccaggcccatctgccttccctgcacgatggaggccaatctggctctgcggagacctcaaggcagcacctgtagggaccatgagaatgaactgctgaacaaacagagtgttcctgctcattttgtcgccttgaatgggagcaaactgaacattaaccttaagatgggagtggagtggacaagctgtgccgaggttgtctcccaagaaaaaaccatgttccccaacttgacagatgtcagggaggtggtgacagaccagttcctatgcagtgggacccaggaggatgagagtccctgcaagggagaatctgggggagcagttttccttgagcggagattcaggttttttcaggtgggtctggtgagctggggtctttacaacccctgccttggctctgctgacaaaaactcccgcaaaagggcccctcgtagcaaggtcccgccgccacgagactttcacatcaatctcttccgcatgcagccctggctgaggcagcacctgggggatgtcctgaattttttacccctc

SEQ ID NO: 5096 - DNA, 342 bp, Homo Sapiens
atgacttgcaaaatgtcgcagctggaacgcaacatagagaccatcatcaacaccttccaccaatactctgtgaagctggggcacccagacaccctgaaccagggggaattcaaagagctggtgcgaaaagatctgcaaaattttctcaagaaggagaataagaatgaaaaggtcatagaacacatcatggaggacctggacacaaatgcagacaagcagctgagcttcgaggagttcatcatgctgatggcgaggctaacctgggcctcccacgagaagatgcacgagggtgacgagggccctggccaccaccataagccaggcctcggggagggcaccccc

SEQ ID NO: 5097 - DNA, 1344 bp, Homo Sapiens
gccgaccaaagaagagattttatcgacatcgaaagtaaatttgccctaaggacccctgaagacacagctgaggacacttgccacctcattcccggagtagcagagtccgtggctacctgtcatttcaatcacagcagcaaaaccttcatggtgatccatggctggacggtaacaggaatgtatgagagttgggtgccaaaacttgtggccgccctgtacaagagagaaccagactccaatgtcattgtggtggactggctgtcacgggctcaggagcattacccagtgtccgcgggctacaccaaactggtgggacaggatgtggcccggtttatcaactggatggaggaggagtttaactaccctctggacaatgtccatctcttgggatacagccttggagcccatgctgctggcattgcaggaagtctgaccaataagaaagtcaacagaattactggcctcgatccagctggacctaactttgagtatgcagaagccccgagtcgtctttctcctgatgatgcagattttgtagacgtcttacacacattcaccagagggtcccctggtcgaagcattggaatccagaaaccagttgggcatgttgacatttacccgaatggaggtacttttcagccaggatgtaacattggagaagctatccgcgtgattgcagagagaggacttggagatgtggaccagctagtgaagtgctcccacgagcgctccattcatctcttcatcgactctctgttgaatgaagaaaatccaagtaaggcctacaggtgcagttccaaggaagcctttgagaaagggctctgcttgagttgtagaaagaaccgctgcaacaatctgggctatgagatcagtaaagtcagagccaaaagaagcagcaaaatgtacctgaagactcgttctcagatgccctacaaagtcttccattaccaagtaaagattcatttttctgggactgagagtgaaacccataccaatcaggcctttgagatttctctgtatggcaccgtggccgagagtgagaacatcccattcactctgcctgaagtttccacaaataagacctactccttcctaatttacacagaggtagatattggagaactactcatgttgaagctcaaatggaagagtgattcatactttagctggtcagactggtggagcagtcccggcttcgccattcagaagatcagagtaaaagcaggagagactcagaaaaaggtgatcttctgttctagggagaaagtgtctcatttgcagaaaggaaaggcacctgcggtatttgtgaaatgccatgacaagtctctgaataagaagtcaggc

SEQ ID NO: 5098 - DNA, 1323 bp, Homo Sapiens
acactggagaagaatgtgttggttgtctctgtagtcacacctggatgtaaccagcttcctactttggagtcagtggagaattataccctgaccataaatgatgaccagtgtttactcctctctgagactgtctggggagctctccgaggtctggagacttttagccagcttgtttggaaatctgctgagggcacattctttatcaacaagactgagattgaggactttccccgctttcctcaccggggcttgctgttggatacatctcgccattacctgccactctctagcatcctggacactctggatgtcatggcgtacaataaattgaacgtgttccactggcatctggtagatgatccttccttcccatatgagagcttcacttttccagagctcatgagaaaggggtcctacaaccctgtcacccacatctacacagcacaggatgtgaaggaggtcattgaatacgcacggctccggggtatccgtgtgcttgcagagtttgacactcctggccacactttgtcctggggaccaggtatccctggattactgactccttgctactctgggtctgagccctctggcacctttggaccagtgaatcccagtctcaataatacctatgagttcatgagcacattcttcttagaagtcagctctgtcttcccagatttttatcttcatcttggaggagatgaggttgatttcacctgctggaagtccaacccagagatccaggactttatgaggaagaaaggcttcggtgaggacttcaagcagctggagtccttctacatccagacgctgctggacatcgtctcttcttatggcaagggctatgtggtgtggcaggaggtgtttgataataaagtaaagattcagccagacacaatcatacaggtgtggcgagaggatattccagtgaactatatgaaggagctggaactggtcaccaaggccggcttccgggcccttctctctgccccctggtacctgaaccgtatatcctatggccctgactggaaggatttctacgtagtggaacccctggcatttgaaggtacccctgagcagaaggctctggtgattggtggagaggcttgtatgtggggagaatatgtggacaacacaaacctggtccccaggctctggcccagagcaggggctgttgccgaaaggctgtggagcaacaagttgacatctgacctgacatttgcctatgaacgtttgtcacacttccgctgtgagttgctgaggcgaggtgtccaggcccaacccctcaatgtaggcttctgtgagcaggagtttgaacagacc

SEQ ID NO: 5099 - DNA, 714 bp, Homo Sapiens
attgtgggaggctgggagtgtgagcagcattcccagccctggcaggcggctctgtaccatttcagcactttccagtgtgggggcatcctggtgcaccgccagtgggtgctcacagctgctcattgcatcagcgacaattaccagctctggctgggtcgccacaacttgtttgacgacgaaaacacagcccagtttgttcatgtcagtgagagcttcccacaccctggcttcaacatgagcctcctggagaaccacacccgccaagcagacgaggactacagccacgacctcatgctgctccgcctgacagagcctgctgataccatcacagacgctgtgaaggtcgtggagttgcccacccaggaacccgaagtggggagcacctgtttggcttccggctggggcagcatcgaaccagagaatttctcatttccagatgatctccagtgtgtggacctcaaaatcctgcctaatgatgagtgcaaaaaagtccacgtccagaaggtgacagacttcatgctgtgtgtcggacacctggaaggtggcaaagacacctgtgtgggtgattcagggggcccgctgatgtgtgatggtgtgctccaaggtgtcacatcatggggctacgtcccttgtggcacccccaataagccttctgtcgccgtcagagtgctgtcttatgtgaagtggatcgaggacaccatagcggagaactcc

SEQ ID NO: 5100 - DNA, 1134 bp, Homo Sapiens
tcccacttcaatcctctgtctctcgaggaactaggctccaacacggggatccaggttttcaatcagattgtgaagtcgaggcctcatgacaacatcgtgatctctccccatgggattgcgtcggtcctggggatgcttcagctgggggcggacggcaggaccaagaagcagctcgccatggtgatgagatacggcgtaaatggagttggtaaaatattaaagaagatcaacaaggccatcgtctccaagaagaataaagacattgtgacagtggctaacgccgtgtttgttaagaatgcctctgaaattgaagtgccttttgttacaaggaacaaagatgtgttccagtgtgaggtccggaatgtgaactttgaggatccagcctctgcctgtgattccatcaatgcatgggttaaaaatgaaaccagggatatgattgacaatctgctgtccccagatcttattgatggtgtgctcaccagactggtcctcgtcaacgcagtgtatttcaagggtctgtggaaatcacggttccaacccgagaacacaaagaaacgcactttcgtggcagccgacgggaaatcctatcaagtgccaatgctggcccagctctccgtgttccggtgtgggtcgacaagtgcccccaatgatttatggtacaacttcattgaactgccctaccacggggaaagcatcagcatgctgattgcactgccgactgagagctccactccgctgtctgccatcatcccacacatcagcaccaagaccatagacagctggatgagcatcatggtgcccaagagggtgcaggtgatcctgcccaagttcacagctgtagcacaaacagatttgaaggagccgctgaaagttcttggcattactgacatgtttgattcatcaaaggcaaattttgcaaaaataacaaggtcagaaaacctccatgtttctcatatcttgcaaaaagcaaaaattgaagtcagtgaagatggaaccaaagcttcagcagcaacaactgcaattctcattgcaagatcatcgcctccctggtttatagtagacagaccttttctgtttttcatccgacataatcctacaggtgctgtgttattcatggggcagataaacaaaccc

SEQ ID NO: 5101 - DNA, 1137 bp, Homo Sapiens
ttgtttggaaaattacatcctggaagccctgaagtgactatgaacattagtcagatgattacttattggggatacccaaatgaagaatatgaagttgtgactgaagatggttatattcttgaagtcaatagaattccttatgggaagaaaaattcagggaatacaggccagagacctgttgtgtttttgcagcatggtttgcttgcatcagccacaaactggatttccaacctgccgaacaacagccttgccttcattctggcagatgctggttatgatgtgtggctgggcaacagcagaggaaacacctgggccagaagaaacttgtactattcaccagattcagttgaattctgggctttcagctttgatgaaatggctaaatatgaccttccagccacaatcgacttcattgtaaagaaagctggacagaagcagctacactatgttggccattcccagggcaccaccattggttttattgccttttccaccaatcccagcctggctaaaagaatcaaaaccttctatgctctagctcctgttgccactgtgaagtatacaaaaagccttataaacaaacttagatttgttcctcaatccctcttcaagtttatatttggtgacaaaatattctacccacacaacttctttgatcaatttcttgctactgaagtgtgctcccgtgagatgctgaatctcctttgcagcaatgccttatttataatttgtggatttgacagtaagaactttaacacgagtcgcttggatgtgtatctatcacataatccagcaggaacttctgttcaaaacatgttccattggacccaggctgttaagtctgggaaattccaagcttatgactggggaagcccagttcagaataggatgcactatgatcagtcccagcctccctactacaatgtgacagccatgaatgtaccaattgcagtgtggaacggtggcaaggacctgttggctgacccccaagatgttggccttttgcttccaaaactccccaatcttatttaccacaaggagattcctttttacaatcacttggactttatctgggcaatggatgcccctcaagaagtttacaatgacattgtttctatgatatcagaagataaaaag

SEQ ID NO: 5102 - DNA, 1473 bp, Homo Sapiens
gacgcccccgaggaggaggaccacgtcctggtgctgcggaaaagcaacttcgcggaggcgctggcggcccacaagtacctgctggtggagttctatgccccttggtgtggccactgcaaggctctggcccctgagtatgccaaagccgctgggaagctgaaggcagaaggttccgagatcaggttggccaaggtggacgccacggaggagtctgacctggcccagcagtacggcgtgcgcggctatcccaccatcaagttcttcaggaatggagacacggcttcccccaaggaatatacagctggcagagaggctgatgacatcgtgaactggctgaagaagcgcacgggcccggctgccaccaccctgcctgacggcgcagctgcagagtccttggtggagtccagcgaggtggctgtcatcggcttcttcaaggacgtggagtcggactctgccaagcagtttttgcaggcagcagaggccatcgatgacataccatttgggatcacttccaacagtgacgtgttctccaaataccagctcgacaaagatggggttgtcctctttaagaagtttgatgaaggccggaacaactttgaaggggaggtcaccaaggagaacctgctggactttatcaaacacaaccagctgccccttgtcatcgagttcaccgagcagacagccccgaagatttttggaggtgaaatcaagactcacatcctgctgttcttgcccaagagtgtgtctgactatgacggcaaactgagcaacttcaaaacagcagccgagagcttcaagggcaagatcctgttcatcttcatcgacagcgaccacaccgacaaccagcgcatcctcgagttctttggcctgaagaaggaagagtgcccggccgtgcgcctcatcaccctggaggaggagatgaccaagtacaagcccgaatcggaggagctgacggcagagaggatcacagagttctgccaccgcttcctggagggcaaaatcaagccccacctgatgagccaggagctgccggaggactgggacaagcagcctgtcaaggtgcttgttgggaagaactttgaagacgtggcttttgatgagaaaaaaaacgtctttgtggagttctatgccccatggtgtggtcactgcaaacagttggctcccatttgggataaactgggagagacgtacaaggaccatgagaacatcgtcatcgccaagatggactcgactgccaacgaggtggaggccgtcaaagtgcacagcttccccacactcaagttctttcctgccagtgccgacaggacggtcattgattacaacggggaacgcacgctggatggttttaagaaattcctggagagcggtggccaggatggggcaggggatgatgacgatctcgaggacctggaagaagcagaggagccagacatggaggaagacgatgatcagaaagctgtgaaagatgaactg

SEQ ID NO: 5103 - DNA, 711 bp, Homo Sapiens
attgtgggaggctgggagtgcgagaagcattcccaaccctggcaggtgcttgtggcctctcgtggcagggcagtctgcggcggtgttctggtgcacccccagtgggtcctcacagctgcccactgcatcaggaacaaaagcgtgatcttgctgggtcggcacagcttgtttcatcctgaagacacaggccaggtatttcaggtcagccacagcttcccacacccgctctacgatatgagcctcctgaagaatcgattcctcaggccaggtgatgactccagccacgacctcatgctgctccgcctgtcagagcctgccgagctcacggatgctgtgaaggtcatggacctgcccacccaggagccagcactggggaccacctgctacgcctcaggctggggcagcattgaaccagaggagttcttgaccccaaagaaacttcagtgtgtggacctccatgttatttccaatgacgtgtgtgcgcaagttcaccctcagaaggtgaccaagttcatgctgtgtgctggacgctggacagggggcaaaagcacctgctcgggtgattctgggggcccacttgtctgtaatggtgtgcttcaaggtatcacgtcatggggcagtgaaccatgtgccctgcccgaaaggccttccctgtacaccaaggtggtgcattaccggaagtggatcaaggacaccatcgtggccaacccc

SEQ ID NO: 5104 - DNA, 1044 bp, Homo Sapiens
gggcccattcccgaggtgctcaagaactacatggacgcccagtactacggggagattggcatcgggacgcccccccagtgcttcacagtcgtcttcgacacgggctcctccaacctgtgggtcccctccatccactgcaaactgctggacatcgcttgctggatccaccacaagtacaacagcgacaagtccagcacctacgtgaagaatggtacctcgtttgacatccactatggctcgggcagcctctccgggtacctgagccaggacactgtgtcggtgccctgccagtcagcgtcgtcagcctctgccctgggcggtgtcaaagtggagaggcaggtctttggggaggccaccaagcagccaggcatcaccttcatcgcagccaagttcgatggcatcctgggcatggcctacccccgcatctccgtcaacaacgtgctgcccgtcttcgacaacctgatgcagcagaagctggtggaccagaacatcttctccttctacctgagcagggacccagatgcgcagcctgggggtgagctgatgctgggtggcacagactccaagtattacaagggttctctgtcctacctgaatgtcacccgcaaggcctactggcaggtccacctggaccaggtggaggtggccagcgggctgaccctgtgcaaggagggctgtgaggccattgtggacacaggcacttccctcatggtgggcccggtggatgaggtgcgcgagctgcagaaggccatcggggccgtgccgctgattcagggcgagtacatgatcccctgtgagaaggtgtccaccctgcccgcgatcacactgaagctgggaggcaaaggctacaagctgtccccagaggactacacgctcaaggtgtcgcaggccgggaagaccctctgcctgagcggcttcatgggcatggacatcccgccacccagcgggccactctggatcctgggcgacgtcttcatcggccgctactacactgtgtttgaccgtgacaacaacagggtgggcttcgccgaggctgcccgcctc

SEQ ID NO: 5105 - DNA, 1014 bp, Homo Sapiens
tctactgttcacgaaatcctgtgcaagctcagcttggagggtgatcactctacacccccaagtgcatatgggtctgtcaaagcctatactaactttgatgctgagcgggatgctttgaacattgaaacagccatcaagaccaaaggtgtggatgaggtcaccattgtcaacattttgaccaaccgcagcaatgcacagagacaggatattgccttcgcctaccagagaaggaccaaaaaggaacttgcatcagcactgaagtcagccttatctggccacctggagacggtgattttgggcttattgaagacacctgctcagtatgacgcttctgagctaaaagcttccatgaaggggctgggaaccgacgaggactctctcattgagatcatctgctccagaaccaaccaggagctgcaggaaattaacagagtctacaaggaaatgtacaagactgatctggagaaggacattatttcggacacatctggtgacttccgcaagctgatggttgccctggcaaagggtagaagagcagaggatggctctgtcattgattatgaactgattgaccaagatgctcgggatctctatgacgctggagtgaagaggaaaggaactgatgttcccaagtggatcagcatcatgaccgagcggagcgtgccccacctccagaaagtatttgataggtacaagagttacagcccttatgacatgttggaaagcatcaggaaagaggttaaaggagacctggaaaatgctttcctgaacctggttcagtgcattcagaacaagcccctgtattttgctgatcggctgtatgactccatgaagggcaaggggacgcgagataaggtcctgatcagaatcatggtctcccgcagtgaagtggacatgttgaaaattaggtctgaattcaagagaaagtacggcaagtccctgtactattatatccagcaagacactaagggcgactaccagaaagcgctgctgtacctgtgtggtggagatgac

SEQ ID NO: 5106 - DNA, 546 bp, Homo Sapiens
cagaagcctcagaggccacgccggcccgcatcccccatcagcaccatccagcccaaggccaattttgatgcgcagcagtttgcagggacctggctccttgtggctgtgggctccgcttgccgtttcctgcaggagcagggccaccgggccgaggccaccacactgcatgtggctccccagggcacagccatggctgtcagtaccttccgaaagctggatgggatctgctggcaggtgcgccagctctatggagacacaggggtcctcggccgcttcctgcttcaagcccgaggcgcccgaggggctgtgcacgtggttgtcgctgagaccgactaccagagtttcgctgtcctgtacctggagcgggcggggcagctgtcagtgaagctctacgcccgctcgctccctgtgagcgactcggtcctgagtgggtttgagcagcgggtccaggaggcccacctgactgaggaccagatcttctacttccccaagtacggcttctgcgaggctgcagaccagttccacgtcctggacgaagtgaggagg

SEQ ID NO: 5107 - DNA, 672 bp, Homo Sapiens
atcgttgggggctacaactgtgaggagaattctgtcccctaccaggtgtccctgaattctggctaccacttctgtggtggctccctcatcaacgaacagtgggtggtatcagcaggccactgctacaagtcccgcatccaggtgagactgggagagcacaacatcgaagtcctggaggggaatgagcagttcatcaatgcagccaagatcatccgccacccccaatacgacaggaagactctgaacaatgacatcatgttaatcaagctctcctcacgtgcagtaatcaacgcccgcgtgtccaccatctctctgcccaccgcccctccagccactggcacgaagtgcctcatctctggctggggcaacactgcgagctctggcgccgactacccagacgagctgcagtgcctggatgctcctgtgctgagccaggctaagtgtgaagcctcctaccctggaaagattaccagcaacatgttctgtgtgggcttccttgagggaggcaaggattcatgtcagggtgattctggtggccctgtggtctgcaatggacagctccaaggagttgtctcctggggtgatggctgtgcccagaagaacaagcctggagtctacaccaaggtctacaactatgtgaaatggattaagaacaccatagctgccaatagc

SEQ ID NO: 5108 - DNA, 672 bp, Homo Sapiens
atcgttgggggctacatctgtgaggagaattctgtcccctaccaggtgtccttgaattctggctaccacttctgcggtggctccctcatcagcgaacagtgggtggtgtcagcaggtcactgctacaagtcccgcatccaggtgagactgggagagcacaacatcgaagtcctggaggggaatgaacagttcatcaatgcagccaagatcatccgccaccccaaatacaacagccggactctggacaatgacatcctgctgatcaagctctcctcacctgccgtcatcaattcccgcgtgtccgccatctctctgcccactgcccctccagctgctggcaccgagtccctcatctccggctggggcaacactctgagttctggtgccgactacccagacgagctgcagtgcctggatgctcctgtgctgagccaggctgagtgtgaagcctcctaccctggaaagattaccaacaacatgttctgtgtgggcttcctcgagggaggcaaggattcctgccagggtgattctggtggccctgtggtctccaatggagagctccaaggaattgtctcctggggctatggctgtgcccagaagaacaggcctggagtctacaccaaggtctacaactatgtggactggattaaggacaccatagctgccaacagc

SEQ ID NO: 5109 - DNA, 486 bp, Homo Sapiens
gaggttcaaaaccagaaacaaccagcatgccatgagaatgatgaaagaccattctatcagaaaacagctccatatgtcccaatgtattatgtgccaaatagctatccttattatggaaccaatttgtaccaacgtagaccagctatagcaattaataatccatgtgtgcctcgcacatattatgcaaacccagctgtagttaggccacatgcccaaattcctcagcggcaatacctgccaaatagccacccacccactgtggtacgtcgcccaaacctgcatccatcatttattgccatccccccaaagaaaattcaggataaaataatcatccctaccatcaataccattgctactgttgaacctacaccagctcctgccactgaaccaacggtggacagtgtagtcactccagaagctttttcagagtccatcatcacgagcacccctgagacaaccacagttgcagttactccacctacggca

SEQ ID NO: 5110 - DNA, 249 bp, Homo Sapiens
tcccttccctgcgacatatgcaaagacgttgtcaccgcagctggtgatatgctgaaggacaatgccactgaggaggagatccttgtttacttggagaagacctgtgactggcttccgaaaccgaacatgtctgcttcatgcaaggagatagtggactcctacctccctgtcatcctggacatcattaaaggagaaatgagccgtcctggggaggtgtgctctgctctcaacctctgcgagtctctccag

SEQ ID NO: 5111 - DNA, 1305 bp, Homo Sapiens
acccaggttcagcaacttcttgtctcaatcacccttcagtcagagtgtgatgctttccccaacatatcttcagatgagtcttatactttacttgtgaaagaaccagtggctgtccttaaggccaacagagtttggggagcattacgaggtttagagacctttagccagttagtttatcaagattcttatggaactttcaccatcaatgaatccaccattattgattctccaaggttttctcacagaggaattttgattgatacatccagacattatctgccagttaagattattcttaaaactctggatgccatggcttttaataagtttaatgttcttcactggcacatagttgatgaccagtctttcccatatcagagcatcacttttcctgagttaagcaataaaggaagctattctttgtctcatgtttatacaccaaatgatgtccgtatggtgattgaatatgccagattacgaggaattcgagtcctgccagaatttgatacccctgggcatacactatcttggggaaaaggtcagaaagacctcctgactccatgttacagtagacaaaacaagttggactcttttggacctataaaccctactctgaatacaacatacagcttccttactacatttttcaaagaaattagtgaggtgtttccagatcaattcattcatttgggaggagatgaagtggaatttaaatgttgggaatcaaatccaaaaattcaagatttcatgaggcaaaaaggctttggcacagattttaagaaactagaatctttctacattcaaaaggttttggatattattgcaaccataaacaagggatccattgtctggcaggaggtttttgatgataaagcaaagcttgcgccgggcacaatagttgaagtatggaaagacagcgcatatcctgaggaactcagtagagtcacagcatctggcttccctgtaatcctttctgctccttggtacttagatttgattagctatggacaagattggaggaaatactataaagtggaacctcttgattttggcggtactcagaaacagaaacaacttttcattggtggagaagcttgtctatggggagaatatgtggatgcaactaacctcactccaagattatggcctcgggcaagtgctgttggtgagagactctggagttccaaagatgtcagagatatggatgacgcctatgacagactgacaaggcaccgctgcaggatggtcgaacgtggaatagctgcacaacctctttatgctggatattgtaaccatgagaacatg

SEQ ID NO: 5112 - DNA, 660 bp, Homo Sapiens
gcccccagatctgtggattggagagagaaaggctacgtgactcctgtgaagaatcagggtcagtgtggttcttgttgggcttttagtgctactggtgctcttgaaggacagatgttccggaaaactgggaggcttatctcactgagtgagcagaatctggtagactgctctgggcctcaaggcaatgaaggctgcaatggtggcctaatggattatgctttccagtatgttcaggataatggaggcctggactctgaggaatcctatccatatgaggcaacagaagaatcctgtaagtacaatcccaagtattctgttgctaatgacaccggctttgtggacatccctaagcaggagaaggccctgatgaaggcagttgcaactgtggggcccatttctgttgctattgatgcaggtcatgagtccttcctgttctataaagaaggcatttattttgagccagactgtagcagtgaagacatggatcatggtgtgctggtggttggctacggatttgaaagcacagaatcagataacaataaatattggctggtgaagaacagctggggtgaagaatggggcatgggtggctacgtaaagatggccaaagaccggagaaaccattgtggaattgcctcagcagccagctaccccactgtg

SEQ ID NO: 5113 - DNA, 1821 bp, Homo Sapiens
ctctacttctcgagggatgcttactgggagaagctgtatgtggaccaggcggccggcacgcccttgctgtacgtccatgccctgcgggacgcccctgaggaggtgcccagcttccgcctgggccagcatctctacggcacgtaccgcacacggctgcatgagaacaactggatctgcatccaggaggacaccggcctcctctaccttaaccggagcctggaccatagctcctgggagaagctcagtgtccgcaaccgcggctttcccctgctcaccgtctacctcaaggtcttcctgtcacccacatcccttcgtgagggcgagtgccagtggccaggctgtgcccgcgtatacttctccttcttcaacacctcctttccagcctgcagctccctcaagccccgggagctctgcttcccagagacaaggccctccttccgcattcgggagaaccgacccccaggcaccttccaccagttccgcctgctgcctgtgcagttcttgtgccccaacatcagcgtggcctacaggctcctggagggtgagggtctgcccttccgctgcgccccggacagcctggaggtgagcacgcgctgggccctggaccgcgagcagcgggagaagtacgagctggtggccgtgtgcaccgtgcacgccggcgcgcgcgaggaggtggtgatggtgcccttcccggtgaccgtgtacgacgaggacgactcggcgcccaccttccccgcgggcgtcgacaccgccagcgccgtggtggagttcaagcggaaggaggacaccgtggtggccacgctgcgtgtcttcgatgcagacgtggtacctgcatcaggggagctggtgaggcggtacacaagcacgctgctccccggggacacctgggcccagcagaccttccgggtggaacactggcccaacgagacctcggtccaggccaacggcagcttcgtgcgggcgaccgtacatgactataggctggttctcaaccggaacctctccatctcggagaaccgcaccatgcagctggcggtgctggtcaatgactcagacttccagggcccaggagcgggcgtcctcttgctccacttcaacgtgtcggtgctgccggtcagcctgcacctgcccagtacctactccctctccgtgagcaggagggctcgccgatttgcccagatcgggaaagtctgtgtggaaaactgccaggcattcagtggcatcaacgtccagtacaagctgcattcctctggtgccaactgcagcacgctaggggtggtcacctcagccgaggacacctcggggatcctgtttgtgaatgacaccaaggccctgcggcggcccaagtgtgccgaacttcactacatggtggtggccaccgaccagcagacctctaggcaggcccaggcccagctgcttgtaacagtggaggggtcatatgtggccgaggaggcgggctgccccctgtcctgtgcagtcagcaagagacggctggagtgtgaggagtgtggcggcctgggctccccaacaggcaggtgtgagtggaggcaaggagatggcaaagggatcaccaggaacttctccacctgctctcccagcaccaagacctgccccgacggccactgcgatgttgtggagacccaagacatcaacatttgccctcaggactgcctccggggcagcattgttgggggacacgagcctggggagccccgggggattaaagctggctatggcacctgcaactgcttccctgaggaggagaagtgcttctgcgagcccgaagacatccaggatccactgtgcgacgagctgtgccgc

SEQ ID NO: 5114 - DNA, 237 bp, Homo Sapiens
ttccccattcctctcccctattgctggctctgcagggctctgatcaagcggatccaagccatgattcccaagggtgcgctagctgtggcagtggcccaggtgtgccgcgtggtacctctggtggcgggcggcatctgccagtgcctggctgagcgctactccgtcatcctgctcgacacgctgctgggccgcatgctgccccagctggtctgccgcctcgtcctccggtgctccatg

SEQ ID NO: 5115 - DNA, 384 bp, Homo Sapiens
aaggaatcccgggccaagaaattccagcggcagcatatggactcagacagttcccccagcagcagctccacctactgtaaccaaatgatgaggcgccggaatatgacacaggggcggtgcaaaccagtgaacacctttgtgcacgagcccctggtagatgtccagaatgtctgtttccaggaaaaggtcacctgcaagaacgggcagggcaactgctacaagagcaactccagcatgcacatcacagactgccgcctgacaaacggctccaggtaccccaactgtgcataccggaccagcccgaaggagagacacatcattgtggcctgtgaagggagcccatatgtgccagtccactttgatgcttctgtggaggactctacc

SEQ ID NO: 5116 - DNA, 282 bp, Homo Sapiens
tcatgctatttcatacctaatgagggagttccaggagattcaaccaggaaatgcatggatctcaaaggaaacaaacacccaataaactcggagtggcagactgacaactgtgagacatgcacttgctacgaaacagaaatttcatgttgcacccttgtttctacacctgtgggttatgacaaagacaactgccaaagaatcttcaagaaggaggactgcaagtatatcgtggtggagaagaaggacccaaaaaagacctgttctgtcagtgaatggataatc

SEQ ID NO: 5117 - DNA, 1149 bp, Homo Sapiens
atggatcctaacgctgcttatgtgaacatgagtaaccatcaccggggcctggcttcagccaacgttgactttgccttcagcctgtataagcacctagtggccttgagtcccaaaaagaacattttcatctcccctgtgagcatctccatggccttagctatgctgtccctgggcacctgtggccacacacgggcccagcttctccagggcctgggtttcaacctcactgagaggtctgagactgagatccaccagggtttccagcacctgcaccaactctttgcaaagtcagacaccagcttagaaatgaccatgggcaatgccttgtttcttgatggcagcctggagttgctggagtcattctcagcagacatcaagcactactatgagtcagaggtcttggctatgaatttccaggactgggcaacagccagcagacagatcaacagctatgtcaagaataagacacaggggaaaattgtcgacttgttttcagggctggatagcccagccatcctcgtcctggtcaactatatcttcttcaaaggcacatggacacagccctttgacctggcaagcaccagggaggagaacttctatgtggacgagacaactgtggtgaaggtgcccatgatgttgcagtcgagcaccatcagttaccttcatgacgcggagctcccctgccagctggtgcagatgaactacgtgggcaatgggactgtcttcttcatccttccggacaaggggaagatgaacacagtcatcgctgcactgagccgggacacgattaacaggtggtccgcaggcctgaccagcagccaggtggacctgtacattccaaaggtcaccatctctggagtctatgacctcggagatgtgctggaggaaatgggcattgcagacttgttcaccaaccaggcaaatttctcacgcatcacccaggacgcccagctgaagtcatcaaaggtggtccataaagctgtgctgcaactcaatgaggagggtgtggacacagctggctccactggggtcaccctaaacctgacgtccaagcctatcatcttgcgtttcaaccagcccttcatcatcatgatcttcgaccacttcacctggagcagccttttcctggcgagggttatgaacccagtg

SEQ ID NO: 5118 - DNA, 723 bp, Homo Sapiens
gtggttggcggtgaagaagcgaggcccaacagctggccctggcaggtctccctgcagtacagctccaatggcaagtggtaccacacctgcggagggtccctgatagccaacagctgggtcctgacggctgcccactgcatcagctcctccaggacctaccgcgtggggctgggccggcacaacctctacgttgcggagtccggctcgctggcagtcagtgtctctaagattgtggtgcacaaggactggaactccaaccaaatctccaaagggaacgacattgccctgctcaaactggctaaccccgtctccctcaccgacaagatccagctggcctgcctccctcctgccggcaccattctacccaacaactacccctgctacgtcacgggctggggaaggctgcagaccaacggggctgttcctgatgtcctgcagcagggccggttgctggttgtggactatgccacctgctccagctctgcctggtggggcagcagcgtgaaaaccagtatgatctgtgctgggggtgatggcgtgatctccagctgcaacggagactctggcgggccactgaactgtcaggcgtctgacggccggtggcaggtgcacggcatcgtcagcttcgggtctcgcctcggctgcaactactaccacaagccctccgtcttcacgcgggtctccaattacatcgactggatcaattcggtgattgcaaataac

SEQ ID NO: 5119 - DNA, 723 bp, Homo Sapiens
atgcttggaggtgaagaagcgaggcccaacagctggccctggcaggtctccctgcagtacagctccaatggccagtggtaccacacctgcggagggtccctgatagccaacagctgggtcctgacggctgcccactgcatcagctcctccgggatctaccgcgtgatgctgggccagcataacctctacgttgcagagtccggctcgctggccgtcagtgtctctaagattgtggtgcacaaggactggaactccgaccaggtctccaaagggaacgacattgccctgctcaaactggctaaccccgtctccctcaccgacaagatccagctggcctgcctccctcctgccggcaccattctacccaacaactacccctgctacgtcacgggctggggaaggctgcagaccaacggggctctccctgatgacctgaagcagggccggttgctggttgtggactatgccacctgctccagctctggctggtggggcagcaccgtgaagacgaatatgatctgtgctgggggtgatggcgtgatatgcacctgcaacggagactccggtgggccgctgaactgtcaggcatctgacggccggtgggaggtgcatggcatcggcagcctcacgtcggtccttggttgcaactactactacaagccctccatcttcacgcgggtctccaactacaacgactggatcaattcggtgattgcaaataac

SEQ ID NO: 5120 - DNA, 714 bp, Homo Sapiens
attgtggggggccggcgagcgcggccccacgcgtggcccttcatggtgtccctgcagctgcgcggaggccacttctgcggcgccaccctgattgcgcccaacttcgtcatgtcggccgcgcactgcgtggcgaatgtaaacgtccgcgcggtgcgggtggtcctgggagcccataacctctcgcggcgggagcccacccggcaggtgttcgccgtgcagcgcatcttcgaaaacggctacgaccccgtaaacttgctcaacgacatcgtgattctccagctcaacgggtcggccaccatcaacgccaacgtgcaggtggcccagctgccggctcagggacgccgcctgggcaacggggtgcagtgcctggccatgggctggggccttctgggcaggaaccgtgggatcgccagcgtcctgcaggagctcaacgtgacggtggtgacgtccctctgccgtcgcagcaacgtctgcactctcgtgaggggccggcaggccggcgtctgtttcggggactccggcagccccttggtctgcaacgggctaatccacggaattgcctccttcgtccggggaggctgcgcctcagggctctaccccgatgcctttgccccggtggcacagtttgtaaactggatcgactctatcatccaacgctccgaggacaacccctgtccccacccccgggacccggacccggccagcaggacccac

SEQ ID NO: 5121 - DNA, 1134 bp, Homo Sapiens
ttcagaacctttcctggcatcccgaagtggaggaaaacccaccttacatacaggattgtgaattatacaccagatttgccaaaagatgctgttgattctgctgttgagaaagctctgaaagtctgggaagaggtgactccactcacattctccaggctgtatgaaggagaggctgatataatgatctcttttgcagttagagaacatggagacttttacccttttgatggacctggaaatgttttggcccatgcctatgcccctgggccagggattaatggagatgcccactttgatgatgatgaacaatggacaaaggatacaacagggaccaatttatttctcgttgctgctcatgaaattggccactccctgggtctctttcactcagccaacactgaagctttgatgtacccactctatcactcactcacagacctgactcggttccgcctgtctcaagatgatataaatggcattcagtccctctatggacctccccctgactcccctgagacccccctggtacccacggaacctgtccctccagaacctgggacgccagccaactgtgatcctgctttgtcctttgatgctgtcagcactctgaggggagaaatcctgatctttaaagacaggcacttttggcgcaaatccctcaggaagcttgaacctgaattgcatttgatctcttcattttggccatctcttccttcaggcgtggatgccgcatatgaagttactagcaaggacctcgttttcatttttaaaggaaatcaattctgggccatcagaggaaatgaggtacgagctggatacccaagaggcatccacaccctaggtttccctccaaccgtgaggaaaatcgatgcagccatttctgataaggaaaagaacaaaacatatttctttgtagaggacaaatactggagatttgatgagaagagaaattccatggagccaggctttcccaagcaaatagctgaagactttccagggattgactcaaagattgatgctgtttttgaagaatttgggttcttttatttctttactggatcttcacagttggagtttgacccaaatgcaaagaaagtgacacacactttgaagagtaacagctggcttaattgt

SEQ ID NO: 5122 - DNA, 666 bp, Homo Sapiens
tggacgggcgaggactcggcggagcccaactctgactcggcggagtggatccgagacatgtacgccaaggtcacggagatctggcaggaggtcatgcagcggcgggacgacgacggcacgctccacgccgcctgccaggtgcagccgtcggccacgctggacgccgcgcagccccgggtgaccggcgtcgtcctcttccggcagcttgcgccccgcgccaagctcgacgccttcttcgccctggagggcttcccgaccgagccgaacagctccagccgcgccatccacgtgcaccagttcggggacctgagccagggctgcgagtccaccgggccccactacaacccgctggccgtgccgcacccgcagcacccgggcgacttcggcaacttcgcggtccgcgacggcagcctctggaggtaccgcgccggcctggccgcctcgctcgcgggcccgcactccatcgtgggccgggccgtggtcgtccacgctggcgaggacgacctgggccgcggcggcaaccaggccagcgtggagaacgggaacgcgggccggcggctggcctgctgcgtggtgggcgtgtgcgggcccgggctctgggagcgccaggcgcgggagcactcagagcgcaagaagcggcggcgcgagagcgagtgcaaggccgcc

SEQ ID NO: 5123 - DNA, 705 bp, Homo Sapiens
atcatcggaggccgggagagcaggccccactcccgcccctacatggcgtatcttcagatccagagtccagcaggtcagagcagatgtggagggttcctggtgcgagaagactttgtgctgacagcagctcattgctggggaagcaatataaatgtcaccctgggcgcccacaatatccagagacgggaaaacacccagcaacacatcactgcgcgcagagccatccgccaccctcaatataatcagcggaccatccagaatgacatcatgttattgcagctgagcagaagagtcagacggaatcgaaacgtgaacccagtggctctgcctagagcccaggagggactgagacccgggacgctgtgcactgtggccggctggggcagggtcagcatgaggaggggaacagatacactccgagaggtgcagctgagagtgcagagggataggcagtgcctccgcatcttcggttcctacgacccccgaaggcagatttgtgtgggggaccggcgggaacggaaggctgccttcaagggggattccggaggccccctgctgtgtaacaatgtggcccacggcatcgtctcctatggaaagtcgtcaggggttcctccagaagtcttcaccagggtctcaagtttcctgccctggataaggacaacaatgagaagcttcaaactgctggatcagatggagacccccctg

SEQ ID NO: 5124 - DNA, 2097 bp, Homo Sapiens
tacgatgatggtatttgcaagtcatcagactgcataaaatcagctgctcgactgatccaaaacatggatgccaccactgagccttgtacagactttttcaaatatgcttgcggaggctggttgaaacgtaatgtcattcccgagaccagctcccgttacggcaactttgacattttaagagatgaactagaagtcgttttgaaagatgtccttcaagaacccaaaactgaagatatagtagcagtgcagaaagcaaaagcattgtacaggtcttgtataaatgaatctgctattgatagcagaggtggagaacctctactcaaactgttaccagacatatatgggtggccagtagcaacagaaaactgggagcaaaaatatggtgcttcttggacagctgaaaaagctattgcacaactgaattctaaatatgggaaaaaagtccttattaatttgtttgttggcactgatgataagaattctgtgaatcatgtaattcatattgaccaacctcgacttggcctcccttctagagattactatgaatgcactggaatctataaagaggcttgtacagcatatgtggattttatgatttctgtggccagattgattcgtcaggaagaaagattgcccatcgatgaaaaccagcttgctttggaaatgaataaagttatggaattggaaaaagaaattgccaatgctacggctaaacctgaagatcgaaatgatccaatgcttctgtataacaagatgacattggcccagatccaaaataacttttcactagagatcaatgggaagccattcagctggttgaatttcacaaatgaaatcatgtcaactgtgaatattagtattacaaatgaggaagatgtggttgtttatgctccagaatatttaaccaaacttaagcccattcttaccaaatattctgccagagatcttcaaaatttaatgtcctggagattcataatggatcttgtaagcagcctcagccgaacctacaaggagtccagaaatgctttccgcaaggccctttatggtacaacctcagaaacagcaacttggagacgttgtgcaaactatgtcaatgggaatatggaaaatgctgtggggaggctttatgtggaagcagcatttgctggagagagtaaacatgtggtcgaggatttgattgcacagatccgagaagtttttattcagactttagatgacctcacttggatggatgccgagacaaaaaagagagctgaagaaaaggccttagcaattaaagaaaggatcggctatcctgatgacattgtttcaaatgataacaaactgaataatgagtacctcgagttgaactacaaagaagatgaatacttcgagaacataattcaaaatttgaaattcagccaaagtaaacaactgaagaagctccgagaaaaggtggacaaagatgagtggataagtggagcagctgtagtcaatgcattttactcttcaggaagaaatcagatagtcttcccagccggcattctgcagccccccttctttagtgcccagcagtccaactcattgaactatgggggcatcggcatggtcataggacacgaaatcacccatggcttcgatgacaatggcagaaactttaacaaagatggagacctcgttgactggtggactcaacagtctgcaagtaactttaaggagcaatcccagtgcatggtgtatcagtatggaaacttttcctgggacctggcaggtggacagcaccttaatggaattaatacactgggagaaaacattgctgataatggaggtcttggtcaagcatacagagcctatcagaattatattaaaaagaatggcgaagaaaaattacttcctggacttgacctaaatcacaaacaactatttttcttgaactttgcacaggtgtggtgtggaacctataggccagagtatgcggttaactccattaaaacagatgtgcacagtccaggcaatttcaggattattgggactttgcagaactctgcagagttttcagaagcctttcactgccgcaagaattcatacatgaatccagaaaagaagtgccgggtttgg

SEQ ID NO: 5125 - DNA, 348 bp, Homo Sapiens
ggcttggagtgtgatggcaaggtcaacatctgctgtaagaaacagttctttgtcagtttcaaggacatcggctggaatgactggatcattgctccctctggctatcatgccaactactgcgagggtgagtgcccgagccatatagcaggcacgtccgggtcctcactgtccttccactcaacagtcatcaaccactaccgcatgcggggccatagcccctttgccaacctcaaatcgtgctgtgtgcccaccaagctgagacccatgtccatgttgtactatgatgatggtcaaaacatcatcaaaaaggacattcagaacatgatcgtggaggagtgtgggtgctca

SEQ ID NO: 5126 - DNA, 672 bp, Homo Sapiens
ggttatcttctggtaaagcatagccaaacggaccaggagcctatgtgtccggtaggcatgaataagctgtggtcgggatacagcctcttatatttcgaagggcaagagaaggcacacaatcaagacctagggctggccggatcttgtttggcccgtttctcaacgatgccgtttctatattgcaatccgggtgacgtatgctattatgctagtcgaaatgataaaagttattggctgagcaccacagcgcctttgccaatgatgcctgttgcagaagacgagataaaaccgtacatctcaagatgttccgtgtgtgaagcgcctgcaatcgccatagccgtccactcacaggacgtctcaatcccacattgtccggcgggctggagaagcttgtggataggttacagtttcctcatgcatacagctgcaggggacgaaggaggcggtcaatcgttagtgtctcccggttcctgcctagaggacttcagggcgacaccatttattgagtgcaatggaggcagaggaacatgtcactactacgctaataaatattctttctggttgaccaccattccagagcagagttttcaaggttctcccagtgcggatacacttaaagcaggtttgattcgtactcatatatcacgttgccaagtctgcatgaaaaacctc

SEQ ID NO: 5127 - DNA, 1356 bp, Homo Sapiens
aaccaggagcaggtgtccccacttaccctcctcaagttgggcaaccaggagcctggtggccagactgccctgaagagtcccccaggagtctgcagcagagaccccaccccagagcagacccacaggctggcccgggccatgatggccttcactgccgacctgttctccctggtggctcaaacgtccacctgccccaacctcatcctgtcacccctgagtgtggccctggcgctgtctcacctggcactaggtgctcagaaccacacgttgcagaggctgcaacaggtgctgcacgcaggctcagggccctgcctcccccatctgctgagccgcctctgccaggacctgggccccggcgcgttccgactggctgccaggatgtacctgcagaaaggatttcccatcaaagaagatttcctggaacaatccgaacagctatttggggcaaagcccgtgagcctgacgggaaagcaggaagatgacctggcaaacatcaaccaatgggtgaaggaggccacggaggggaagattcaggaattcctctctgggctgccggaagacaccgtgttgcttctcctcaacgccatccacttccagggtttctggaggaacaagtttgacccgagccttacccagagagactccttccacctggacgagcagttcacggtgcccgtggaaatgatgcaggcccgcacgtacccgctgcgctggttcttgctggagcagcctgagatccaggtggctcatttcccctttaagaacaacatgagctttgtggtccttgtacccacccactttgaatggaacgtgtcccaggtactggccaacctgagttgggacaccctgcacccacctctggtgtgggagaggcccaccaaggtccggctgcctaagctgtatctgaaacaccaaatggacctggtggccaccctcagccagctgggcctgcaggagttgttccaggccccagacctgcgtgggatctccgagcagagcctggtggtgtccggcgtgcagcatcagtccaccctggagctcagcgaggtcggcgtggaggcggcggcggccaccagcattgccatgtcccgcatgtccctgtcctccttcagcgtgaaccgccccttcctcttcttcatcttcgaggacaccacaggccttcccctcttcgtgggcagcgtgaggaaccccaaccccagtgcaccgcgggagctcaaggaacagcaggattccccgggcaacaaggacttcctccagagcctgaaaggcttcccccgcggagacaagcttttcggccctgacttaaaacttgtgccccccatggaggaggattacccccagtttggcagccccaag

SEQ ID NO: 5128 - DNA, 702 bp, Homo Sapiens
gctccgtggcagtgcgcgccctgctccgccgagaagctcgcgctctgcccgccggtgtccgcctcgtgctcggaggtcacccggtccgccggctgcggctgttgcccgatgtgcgccctgcctctgggcgccgcgtgcggcgtggcgactgcacgctgcgcccggggactcagttgccgcgcgctgccgggggagcagcaacctctgcacgccctcacccgcggccaaggcgcctgcgtgcaggagtctgacgcctccgctccccatgctgcagaggcagggagccctgaaagcccagagagcacggagataactgaggaggagctcctggataatttccatctgatggccccttctgaagaggatcattccatcctttgggacgccatcagtacctatgatggctcgaaggctctccatgtcaccaacatcaaaaaatggaaggagccctgccgaatagaactctacagagtcgtagagagtttagccaaggcacaggagacatcaggagaagaaatttccaaattttacctgccaaactgcaacaagaatggattttatcacagcagacagtgtgagacatccatggatggagaggcgggactctgctggtgcgtctacccttggaatgggaagaggatccctgggtctccagagatcaggggagaccccaactgccagatatattttaatgtacaaaac

SEQ ID NO: 5129 - DNA, 726 bp, Homo Sapiens
gttgtcaatggtgaggatgcggtcccctacagctggccctggcaggtttccctgcagtatgagaaaagtggaagcttctaccacacgtgtggcggtagcctcatcgcccccgactgggttgtgactgccggccactgcatctcgagctcctggacctaccaggtggtgttgggcgagtacgaccgtgctgtgaaggagggccccgagcaggtgatccccatcaactctggggacctctttgtgcatccactctggaaccgctcgtgtgtggcctgtggcaatgacatcgccctcatcaagctctcacgcagcgcccagctgggagacgccgtccagctcgcctcactccctcccgctggtgacatccttcccaacgagacaccctgctacatcaccggctggggccgtctctataccaacgggccactcccagacaagctgcaggaggccctgctgcccgtggtggactatgaacactgctccaggtggaactggtggggttcctccgtgaagaagaccatggtgtgtgctggaggggacatccgctccggctgcaacggtgactctggaggacccctcaactgccccacagaggatggtggctggcaggtccatggcgtgaccagctttgtttctgcctttggctgcaacacccgcaggaagcccacggtgttcactcgagtctccgccttcatcgactggattgaggagaccatagcaagccac

SEQ ID NO: 5130 - DNA, 1185 bp, Homo Sapiens
cggtgtttgaacctgaagagccccacagccccacctgacctctacttccaggactcggggctctcacgctttctgctcaagtcctgtcctcttctgaccaaagaatacattccaccgttgatctgggggaaaagtggacacatccagacagccttgtatgggaagatgggaagggtgaggtcgccacatccttatgggcaccggaagttcatcactatgtctgatggagccacttctacattcgacctcttcgagcccttggctgagcactgtgttggagatgatatcaccatggtcatctgccctggaattgccaatcacagcgagaagcaatacatccgcactttcgttgactacgcccagaaaaatggctatcggtgcgccgtgctgaaccacctgggtgccctgcccaacattgaattgacctcgccacgcatgttcacctatggctgcacgtgggaatttggagccatggtgaactacatcaagaagacatatcccctgacccagctggtcgtcgtgggcttcagcctgggtggtaacattgtgtgcaaatacttgggggagactcaggcaaaccaagagaaggtcctgtgctgcgtcagcgtgtgccaggggtacagtgcactgagggcccaggaaaccttcatgcaatgggatcagtgccagcggttctacaacttcctcatggctgacaacatgaagaagatcatcctctcgcacaggcaagctctttttggagaccatgttaagaaaccccagagcctggaagacacggacttgagccggctctacacagcaacatccctgatgcagattgatgacaatgtgatgaggaagtttcacggctataactccctgaaggaatactatgaggaagaaagttgcatgcggtacctgcacaggatttatgttcctctcatgctggttaatgcagctgacgatccgttggtgcatgaaagtcttctaaccattccaaaatctctttcagagaaacgagagaacgtcatgtttgtgctgcctctgcatgggggccacttgggcttctttgagggctctgtgctgttccccgagcccctgacatggatggataagctggtggtggagtacgccaacgccatttgccaatgggagcgtaacaagttgcagtgctctgacacggagcaggtggaggccgacctggag

SEQ ID NO: 5131 - DNA, 726 bp, Homo Sapiens
gttgtccatggtgaggatgcggtcccctacagctggccctggcaggtttccctgcagtatgagaaaagtggaagcttctaccacacgtgtggcggtagcctcatcgcccccgattgggttgtgactgccggccactgcatctcgagggatctgacctaccaggtggtgttgggtgagtacaaccttgctgtgaaggagggccccgagcaggtgatccccatcaactctgaggagctgtttgtgcatccactctggaaccgctcgtgtgtggcctgtggcaatgacatcgccctcatcaagctctcacgcagcgcccagctgggagatgccgtccagctcgcctcactccctcccgctggtgacatccttcccaacaagacaccctgctacatcaccggctggggccgtctctataccaatgggccactcccagacaagctgcagcaggcccggctgcccgtggtggactataagcactgctccaggtggaactggtggggttccaccgtgaagaaaaccatggtgtgtgctggagggtacatccgctccggctgcaacggtgactctggaggacccctcaactgccccacagaggatggtggctggcaggtccacggtgtgaccagctttgtttctggctttggctgcaacttcatctggaagcctacagtgttcactcgagtctccgccttcatcgactggattgaggagaccatagcaagccac

SEQ ID NO: 5132 - DNA, 363 bp, Homo Sapiens
tggagcccccaggaggaggacaggataatcgagggtggcatctatgatgcagacctcaatgatgagcgggtacagcgtgcccttcactttgtcatcagcgagtataacaaggccactgaagatgagtactacagacgcctgctgcgggtgctacgagccagggagcagatcgtgggcggggtgaattacttcttcgacatagaggtgggccgaaccatatgtaccaagtcccagcccaacttggacacctgtgccttccatgaacagccagaactgcagaagaaacagttgtgctctttccagatctacgaagttccctgggaggacagaatgtccctggtgaattccaggtgtcaagaagcc

SEQ ID NO: 5133 - DNA, 519 bp, Homo Sapiens
tactcactatttccaaatagcccaaaatggacttccaaagtggtcacctacaggatcgtatcatatactcgagacttaccgcatattacagtggatcgattagtgtcaaaggctttaaacatgtggggcaaagagatccccctgcatttcaggaaagttgtatggggaactgctgacatcatgattggctttgcgcgaggagctcatggggactcctacccatttgatgggccaggaaacacgctggctcatgcctttgcgcctgggacaggtctcggaggagatgctcacttcgatgaggatgaacgctggacggatggtagcagtctagggattaacttcctgtatgctgcaactcatgaacttggccattctttgggtatgggacattcctctgatcctaatgcagtgatgtatccaacctatggaaatggagatccccaaaattttaaactttcccaggatgatattaaaggcattcagaaactatatggaaagagaagtaattcaagaaagaaa

SEQ ID NO: 5134 - DNA, 1134 bp, Homo Sapiens
ttcagctcctttcctggcatgccgaagtggaggaaaacccaccttacatacaggattgtgaattatacaccagatttgccaagagatgctgttgattctgccattgagaaagctctgaaagtctgggaagaggtgactccactcacattctccaggctgtatgaaggagaggctgatataatgatctcttttgcagttaaagaacatggagacttttactcttttgatggcccaggacacagtttggctcatgcctacccacctggacctgggctttatggagatattcactttgatgatgatgaaaaatggacagaagatgcatcaggcaccaatttattcctcgttgctgctcatgaacttggccactccctggggctctttcactcagccaacactgaagctttgatgtacccactctacaactcattcacagagctcgcccagttccgcctttcgcaagatgatgtgaatggcattcagtctctctacggacctccccctgcctctactgaggaacccctggtgcccacaaaatctgttccttcgggatctgagatgccagccaagtgtgatcctgctttgtccttcgatgccatcagcactctgaggggagaatatctgttctttaaagacagatatttttggcgaagatcccactggaaccctgaacctgaatttcatttgatttctgcattttggccctctcttccatcatatttggatgctgcatatgaagttaacagcagggacaccgtttttatttttaaaggaaatgagttctgggccatcagaggaaatgaggtacaagcaggttatccaagaggcatccataccctgggttttcctccaaccataaggaaaattgatgcagctgtttctgacaaggaaaagaagaaaacatacttctttgcagcggacaaatactggagatttgatgaaaatagccagtccatggagcaaggcttccctagactaatagctgatgactttccaggagttgagcctaaggttgatgctgtattacaggcatttggatttttctacttcttcagtggatcatcacagtttgagtttgaccccaatgccaggatggtgacacacatattaaagagtaacagctggttacattgc

SEQ ID NO: 5135 - DNA, 402 bp, Homo Sapiens
gcttgtggtctggtcgccagcaacctgaatctcaaacctggagagtgccttcgagtgcgaggcgaggtggctcctgacgctaagagcttcgtgctgaacctgggcaaagacagcaacaacctgtgcctgcacttcaaccctcgcttcaacgcccacggcgacgccaacaccatcgtgtgcaacagcaaggacggcggggcctgggggaccgagcagcgggaggctgtctttcccttccagcctggaagtgttgcagaggtgtgcatcaccttcgaccaggccaacctgaccgtcaagctgccagatggatacgaattcaagttccccaaccgcctcaacctggaggccatcaactacatggcagctgacggtgacttcaagatcaaatgtgtggcctttgac

SEQ ID NO: 5136 - DNA, 486 bp, Homo Sapiens
atggacatcccccagaccaagcaggacctggagctcccaaagttggcagggacctggcactccatggccatggcgaccaacaacatctccctcatggcgacactgaaggcccctctgagggtccacatcacctcactgttgcccacccccgaggacaacctggagatcgttctgcacagatgggagaacaacagctgtgttgagaagaaggtccttggagagaagactgagaatccaaagaagttcaagatcaactatacggtggcgaacgaggccacgctgctcgatactgactacgacaatttcctgtttctctgcctacaggacaccaccacccccatccagagcatgatgtgccagtacctggccagagtcctggtggaggacgatgagatcatgcagggattcatcagggctttcaggcccctgcccaggcacctatggtacttgctggacttgaaacagatggaagagccgtgccgtttc

SEQ ID NO: 5137 - DNA, 1005 bp, Homo Sapiens
tcatggtggtacatgagagctacaggtggctcctccagggtgatgtgcgataatgtgccaggcctggtgagcagccagcggcagctgtgtcaccgacatccagatgtgatgcgtgccattagccagggcgtggccgagtggacagcagaatgccagcaccagttccgccagcaccgctggaattgcaacaccctggacagggatcacagcctttttggcagggtcctactccgaagtagtcgggaatctgcctttgtttatgccatctcctcagctggagttgtatttgccatcaccagggcctgtagccaaggagaagtaaaatcctgttcctgtgatccaaagaagatgggaagcgccaaggacagcaaaggcatttttgattggggtggctgcagtgataacattgactatgggatcaaatttgcccgcgcatttgtggatgcaaaggaaaggaaaggaaaggatgccagagccctgatgaatcttcacaacaacagagctggcaggaaggctgtaaagcggttcttgaaacaagagtgcaagtgccacggggtgagcggctcatgtactctcaggacatgctggctggccatggccgacttcaggaaaacgggcgattatctctggaggaagtacaatggggccatccaggtggtcatgaaccaggatggcacaggtttcactgtggctaacgagaggtttaagaagccaacgaaaaatgacctcgtgtattttgagaattctccagactactgtatcagggaccgagaggcaggctccctgggtacagcaggccgtgtgtgcaacctgacttcccggggcatggacagctgtgaagtcatgtgctgtgggagaggctacgacacctcccatgtcacccggatgaccaagtgtgggtgtaagttccactggtgctgcgccgtgcgctgtcaggactgcctggaagctctggatgtgcacacatgcaaggcccccaagaacgctgactggacaaccgctaca

SEQ ID NO: 5138 - DNA, 714 bp, Homo Sapiens
gagcctcagaattgctcagccaccaaaagtaactaccttcgaggtactggtccctacccaccttccgtggactggcggaaaaaaggaaattttgtctcacctgtgaaaaatcagggtgcctgcggcagttgctggactttctccaccactggggccctggagtctgcaatcgccatcgcaaccggaaagatgctgtccttggcggaacagcagctggtggactgcgcccaggacttcaataatcacggctgccaagggggtctccccagccaggctttcgagtatatcctgtacaacaaggggatcatgggtgaagacacctacccctaccagggcaaggatggttattgcaagttccaacctggaaaggccatcggctttgtcaaggatgtagccaacatcacaatctatgacgaggaagcgatggtggaggctgtggccctctacaaccctgtgagctttgcctttgaggtgactcaggacttcatgatgtatagaacgggcatctactccagtacttcctgccataaaactccagataaagtaaaccatgcagtactggctgttgggtatggagaaaaaaatgggatcccttactggatcgtgaaaaactcttggggtccccagtggggaatgaacgggtacttcctcatcgagcgcggaaagaacatgtgtggcctggctgcctgcgcctcctaccccatccctctggtg

SEQ ID NO: 5139 - DNA, 744 bp, Homo Sapiens
cacacggccgcgcaggacaactgcacgtgtcccaccaacaagatgaccgtgtgcagccccgacggccccggcggccgctgccagtgccgcgcgctgggctcgggcatggcggtcgactgctccacgctgacctccaagtgtctgctgctcaaggcgcgcatgagcgcccccaagaacgcccgcacgctggtgcggccgagtgagcacgcgctcgtggacaacgatggcctctacgaccccgactgcgaccccgagggccgcttcaaggcgcgccagtgcaaccagacgtcggtgtgctggtgcgtgaactcggtgggcgtgcgccgcacggacaagggcgacctgagcctacgctgcgatgagctggtgcgcacccaccacatcctcattgacctgcgccaccgccccaccgccggcgccttcaaccactcagacctggacgccgagctgaggcggctcttccgcgagcgctatcggctgcaccccaagttcgtggcggccgtgcactacgagcagcccaccatccagatcgagctgcggcagaacacgtctcagaaggccgccggtgacgtggatatcggcgatgccgcctactacttcgagagggacatcaagggcgagtctctattccagggccgcggcggcctggacttgcgcgtgcgcggagaacccctgcaggtggagcgcacgctcatctattacctggacgagattcccccgaagttctccatgaagcgcctcacc

SEQ ID NO: 5140 - DNA, 1452 bp, Homo Sapiens
gtcatcccagctgaggaggagaacccggccttctggaaccgccaggcagctgaggccctggatgctgccaagaagctgcagcccatccagaaggtcgccaagaacctcatcctcttcctgggcgatgggttgggggtgcccacggtgacagccaccaggatcctaaaggggcagaagaatggcaaactggggcctgagacgcccctggccatggaccgcttcccatacctggctctgtccaagacatacaatgtggacagacaggtgccagacagcgcagccacagccacggcctacctgtgcggggtcaaggccaacttccagaccatcggcttgagtgcagccgcccgctttaaccagtgcaacacgacacgcggcaatgaggtcatctccgtgatgaaccgggccaagcaagcaggaaagtcagtaggagtggtgaccaccacacgggtgcagcacgcctcgccagccggcacctacgcacacacagtgaaccgcaactggtactcagatgctgacatgcctgcctcagcccgccaggaggggtgccaggacatcgccactcagctcatctccaacatggacattgacgtgatccttggcggaggccgcaagtacatgtttcccatggggaccccagaccctgagtacccagctgatgccagccagaatggaatcaggctggacgggaagaacctggtgcaggaatggctggcaaagcaccagggtgcctggtatgtgtggaaccgcactgagctcatgcaggcgtccctggaccagtctgtgacccatctcatgggcctctttgagcccggagacacgaaatatgagatccaccgagaccccacactggacccctccctgatggagatgacagaggctgccctgcgcctgctgagcaggaacccccgcggcttctacctctttgtggagggcggccgcatcgaccatggtcatcatgagggtgtggcttaccaggcactcactgaggcggtcatgttcgacgacgccattgagagggcgggccagctcaccagcgaggaggacacgctgaccctcgtcaccgctgaccactcccatgtcttctcctttggtggctacaccttgcgagggagctccatcttcgggttggcccccagcaaggctcaggacagcaaagcctacacgtccatcctgtacggcaatggcccgggctacgtgttcaactcaggcgtgcgaccagacgtgaatgagagcgagagcgggagccccgattaccagcagcaggcggcggtgcccctgtcgtccgagacccacggaggcgaagacgtggcggtgtttgcgcgcggcccgcaggcgcacctggtgcatggtgtgcaggagcagagcttcgtagcgcatgtcatggccttcgctgcctgtctggagccctacacggcctgcgacctggcgcctcccgcctgcaccaccgac

SEQ ID NO: 5141 - DNA, 1824 bp, Homo Sapiens
gacgtgtaccaggagcccacagaccccaagtttcctcagcagtggtacctgtctggtgtcactcagcgggacctgaatgtgaaggcggcctgggcgcagggctacacagggcacggcattgtggtctccattctggacgatggcatcgagaagaaccacccggacttggcaggcaattatgatcctggggccagttttgatgtcaatgaccaggaccctgacccccagcctcggtacacacagatgaatgacaacaggcacggcacacggtgtgcgggggaagtggctgcggtggccaacaacggtgtctgtggtgtaggtgtggcctacaacgcccgcattggaggggtgcgcatgctggatggcgaggtgacagatgcagtggaggcacgctcgctgggcctgaaccccaaccacatccacatctacagtgccagctggggccccgaggatgacggcaagacagtggatgggccagcccgcctcgccgaggaggccttcttccgtggggttagccagggccgaggggggctgggctccatctttgtctgggcctcggggaacgggggccgggaacatgacagctgcaactgcgacggctacaccaacagtatctacacgctgtccatcagcagcgccacgcagtttggcaacgtgccgtggtacagcgaggcctgctcgtccacactggccacgacctacagcagtggcaaccagaatgagaagcagatcgtgacgactgacttgcggcagaagtgcacggagtctcacacgggcacctcagcctctgcccccttagcagccggcatcattgctctcaccctggaggccaataagaacctcacatggcgggacatgcaacacctggtggtacagacctcgaagccagcccacctcaatgccaacgactgggccaccaatggtgtgggccggaaagtgagccactcatatggctacgggcttttggacgcaggcgccatggtggccctggcccagaattggaccacagtggccccccagcggaagtgcatcatcgacatcctcaccgagcccaaagacatcgggaaacggctcgaggtgcggaagaccgtgaccgcgtgcctgggcgagcccaaccacatcactcggctggagcacgctcaggcgcggctcaccctgtcctataatcgccgtggcgacctggccatccacctggtcagccccatgggcacccgctccaccctgctggcagccaggccacatgactactccgcagatgggtttaatgactgggccttcatgacaactcattcctgggatgaggatccctctggcgagtgggtcctagagattgaaaacaccagcgaagccaacaactatgggacgctgaccaagttcaccctcgtactctatggcaccgcccctgaggggctgcccgtacctccagaaagcagtggctgcaagaccctcacgtccagtcaggcctgtgtggtgtgcgaggaaggcttctccctgcaccagaagagctgtgtccagcactgccctccaggcttcgccccccaagtcctcgatacgcactatagcaccgagaatgacgtggagaccatccgggccagcgtctgcgccccctgccacgcctcatgtgccacatgccaggggccggccctgacagattgcctcagctgccccagccacgcctccttggaccctgtggagcagacttgctcccggcaaagccagagcagccgagagtccccgccacagcagcagccacctcggctgcccccggaggtggaggcggggcaacggctgcgggcagggctgctgccctcacacctgcctgag

SEQ ID NO: 5142 - DNA, 942 bp, Homo Sapiens
caggacacctgcaggcaagggcaccctggaatccctgggaaccccggtcacaatggtctgcctggaagagatggacgagacggagcgaagggtgacaaaggcgatgcaggagaaccaggacgtcctggcagcccggggaaggatgggacgagtggagagaagggagaacgaggagcagatggaaaagttgaagcaaaaggcatcaaaggtgatcaaggctcaagaggatccccaggaaaacatggccccaaggggcttgcagggcccatgggagagaaaggcctccgaggagagactgggcctcaggggcagaaggggaataagggtgacgtgggtcccactggtcctgaggggccaaggggcaacattgggcctttgggcccaactggtttaccgggccccatgggccctattggaaagcctggtcccaagggagaagctggacccacggggccccagggtgagccaggagtccggggaataagaggctggaaaggagatcgaggagagaaagggaaaatcggtgagactctagtcttgccaaaaagtgctttcactgtggggctcacggtgctgagcaagtttccttcttcagatgtgcccattaaatttgataagatcctgtataacgaattcaaccattatgatacagcagcggggaaattcacgtgccacattgctggggtctattacttcacctaccacatcactgttttctccaggaatgttcaggtgtctttggtcaaaaatggagtaaaaatactgcacaccaaagatgcttacatgagctctgaggaccaggcctctggcggcattgtcctgcagctgaagctcggggatgaggtgtggctgcaggtgacaggaggagagaggttcaatggcttgtttgctgatgaggacgatgacacaactttcacagggttccttctgttcagcagcccg

SEQ ID NO: 5143 - DNA, 978 bp, Homo Sapiens
gtagatgaacagcccctggagaactacctggatatggagtacttcggcactatcggcatcggaactcctgcccaggatttcaccgtcgtctttgacaccggctcctccaacctgtgggtgccctcagtctactgctccagtcttgcctgcaccaaccacaaccgcttcaaccctgaggattcttccacctaccagtccaccagcgagacagtctccatcacctacggcaccggcagcatgacaggcatcctcggatacgacactgtccaggttggaggcatctctgacaccaatcagatcttcggcctgagcgagacggaacctggctccttcctgtattatgctcccttcgatggcatcctggggctggcctaccccagcatttcctcctccggggccacacccgtctttgacaacatctggaaccagggcctggtttctcaggacctcttctctgtctacctcagcgccgatgaccagagtggcagcgtggtgatctttggtggcattgactcttcttactacactggaagtctgaactgggtgcctgttaccgtcgagggttactggcagatcaccgtggacagcatcaccatgaacggagaggccatcgcctgcgctgagggctgccaggccattgttgacaccggcacctctctgctgaccggcccaaccagccccattgccaacatccagagcgacatcggagccagcgagaactcagatggcgacatggtggtcagctgctcagccatcagcagcctgcccgacatcgtcttcaccatcaatggagtccagtaccccgtgccacccagtgcctacatcctgcagagcgaggggagctgcatcagtggcttccagggcatgaacctccccaccgaatctggagagctttggatcctgggtgatgtcttcatccgccagtactttaccgtcttcgacagggcaaacaaccaggtcggcctggcccccgtggct

SEQ ID NO: 5144 - DNA, 978 bp, Homo Sapiens
gtagatgaacagcccctggagaactacctggatatggagtacttcggcactatcggcatcggaactcctgcccaggatttcactgtcctctttgacaccggctcctccaacctgtgggtgccctcagtctactgctccagtcttgcctgcaccaaccacaaccgcttcaaccctgaggattcttccacctaccagtccaccagcgagacagtctccatcacctacggcaccggcagcatgacaggcatcctcggatacgacactgtccaggttggaggcatctctgacaccaatcagatcttcggcctgagcgagacggaacctggctccttcctgtattatgctcccttcgatggcatcctggggctggcctaccccagcatttcctcctccggggccacacccgtctttgacaacatctggaaccagggcctggtttctcaggacctcttctctgtctacctcagcgccgatgaccagagtggcagcgtggtgatctttggtggcattgactcttcttactacactggaagtctgaactgggtgcctgttaccgtcgagggttactggcagatcaccgtggacagcatcaccatgaacggagaggccatcgcctgcgctgagggctgccaggccattgttgacaccggcacctctctgctgaccggcccaaccagccccattgccaacatccagagcgacatcggagccagcgagaactcagatggcgacatggtggtcagctgctcagccatcagcagcctgcccgacatcgtcttcaccatcaatggagtccagtaccccgtgccacccagtgcctacatcctgcagagcgagggcagctgcatcagtggcttccagggcatgaacctccccaccgaatctggagagctttggatcctgggtgatgtcttcatccgccagtactttaccgtcttcgacaggacaaacaaccaggtcggcctggcccccgtggct

SEQ ID NO: 5145 - DNA, 312 bp, Homo Sapiens
cgaagcttcttttcgttccttggcgaggcttttgatggggctcgggacatgtggagagcctactctgacatgagagaagccaattacatcggctcagacaaatacttccatgctcgggggaactatgatgctgccaaaaggggacctgggggtgcctgggctgcagaagtgatcagcgatgccagagagaatatccagagattctttggccatggtgcggaggactcgctggctgatcaggctgccaatgaatggggcaggagtggcaaagaccccaatcacttccgacctgctggcctgcctgagaaatac

SEQ ID NO: 5146 - DNA, 312 bp, Homo Sapiens
cgaagcttcttttcgttccttggcgaggcttttgatggggctcgggacatgtggagagcctactctgacatgagagaagccaattacatcggctcagacaaatacttccatgctcgggggaactatgatgctgccaaaaggggacctgggggtgcctgggccgcagaagtgatcagcaatgccagagagaatatccagagactcacaggccatggtgcggaggactcgctggccgatcaggctgccaataaatggggcaggagtggcagagaccccaatcacttccgacctgctggcctgcctgagaaatac

SEQ ID NO: 5147 - DNA, 573 bp, Homo Sapiens
gtccaaaccgttccgttatccaggctttttgaccacgctatgctccaagcccatcgcgcgcaccagctggccattgacacctaccaggagtttgaagaaacctatatcccaaaggaccagaagtattcattcctgcatgactcccagacctccttctgcttctcagactctattccgacaccctccaacatggaggaaacgcaacagaaatccaatctagagctgctccgcatctccctgctgctcatcgagtcgtggctggagcccgtgcggttcctcaggagtatgttcgccaacaacctggtgtatgacacctcggacagcgatgactatcacctcctaaaggacctagaggaaggcatccaaacgctgatggggaggctggaagacggcagccgccggactgggcagatcctcaagcagacctacagcaagtttgacacaaactcgcacaaccatgacgcactgctcaagaactacgggctgctctactgcttcaggaaggacatggacaaggtcgagacattcctgcgcatggtgcagtgccgctctgtggagggcagctgtggcttc

SEQ ID NO: 5148 - DNA, 573 bp, Homo Sapiens
gtccaaaccgttcccttatccaggctttttgaccacgctatgctccaagcccatcgcgcgcaccagctggccattgacacctaccaggagtttgaagaaacctatatcccaaaggaccagaagtattcattcctgcatgactcccagacctccttctgcttctcagactctattccgacaccctccaacatggaggaaacgcaacagaaatccaatctagagctgctccgcatctccctgctgctcatcgagtcgtggctggagcccgtgcggttcctcaggagtatgttcgccaacaacctggtgtatgacacctcggacagcgatgactatcacctcctaaaggacctagaggaaggcatccaaacgctgatggggaggctggaagacggcagccgccggactgggcagatcctcaagcagacctacagcaagtttgacacaaactcgcacaaccatgacgcactgctcaagaactacgggctgctctactgcttcaggaaggacatggacaaggtcgagacattcctgcgcatggtgcagtgccgctctgtggagggcagctgtggcttc

SEQ ID NO: 5149 - DNA, 216 bp, Homo Sapiens
gaggacaacgatgagtttttcatggacttcctgcaaacactactggtggggaccccagaggagctctatgaggggaccttgggcaagtacaatgtcaacgaagatgccaaggcagcaatgactgaactcaagtcctgcagagatggcctgcagccaatgcacaaggcggagctggtcaagctgctggtgcaagtgctgggcagtcaggacggtgcc

SEQ ID NO: 5150 - DNA, 393 bp, Homo Sapiens
tatcctacgcagagagccaggtaccaatgggtgcgctgcaatccagacagtaattctgcaaactgccttgaagaaaaaggaccaatgttcgaactacttccaggtgaatccaacaagatcccccgtctgaggactgacctttttccaaagacgagaatccaggacttgaatcgtatcttcccactttctgaggactactctggatcaggcttcggctccggctccggctctggatcaggatctgggagtggcttcctaacggaaatggaacaggattaccaactagtagacgaaagtgatgctttccatgacaaccttaggtctcttgacaggaatctgccctcagacagccaggacttgggtcaacatggattagaagaggattttatgtta

SEQ ID NO: 5151 - DNA, 681 bp, Homo Sapiens
atcatcgggggacatgaggccaagccccactcccgcccctacatggcttatcttatgatctgggatcagaagtctctgaagaggtgcggtggcttcctgatacaagacgacttcgtgctgacagctgctcactgttggggaagctccataaatgtcaccttgggggcccacaatatcaaagaacaggagccgacccagcagtttatccctgtgaaaagacccatcccccatccagcctataatcctaagaacttctccaacgacatcatgctactgcagctggagagaaaggccaagcggaccagagctgtgcagcccctcaggctacctagcaacaaggcccaggtgaagccagggcagacatgcagtgtggccggctgggggcagacggcccccctgggaaaacactcacacacactacaagaggtgaagatgacagtgcaggaagatcgaaagtgcgaatctgacttacgccattattacgacagtaccattgagttgtgcgtgggggacccagagattaaaaagacttcctttaagggggactctggaggccctcttgtgtgtaacaaggtggcccagggcattgtctcctatggacgaaacaatggcatgcctccacgagcctgcaccaaagtctcaagctttgtacactggataaagaaaaccatgaaacgccac

SEQ ID NO: 5152 - DNA, 402 bp, Homo Sapiens
aaacctccacagtttacctgggctcaatggtttgaaacccagcacatcaatatgacctcccagcaatgcaccaatgcaatgcaggtcattaacaattatcaacggcgatgcaaaaaccaaaatactttccttcttacaacttttgctaacgtagttaatgtttgtggtaacccaaatatgacctgtcctagtaacaaaactcgcaaaaattgtcaccacagtggaagccaggtgcctttaatccactgtaacctcacaactccaagtccacagaatatttcaaactgcaggtatgcgcagacaccagcaaacatgttctatatagttgcatgtgacaacagagatcaacgacgagaccctccacagtatccggtggttccagttcacctggatagaatcatc

SEQ ID NO: 5153 - DNA, 2649 bp, Homo Sapiens
gcacaccccggccgtcccagagcagtgcccacacagtgcgacgtcccccccaacagccgcttcgattgcgcccctgacaaggccatcacccaggaacagtgcgaggcccgcggctgttgctacatccctgcaaagcaggggctgcagggagcccagatggggcagccctggtgcttcttcccacccagctaccccagctacaagctggagaacctgagctcctctgaaatgggctacacggccaccctgacccgtaccacccccaccttcttccccaaggacatcctgaccctgcggctggacgtgatgatggagactgagaaccgcctccacttcacgatcaaagatccagctaacaggcgctacgaggtgcccttggagaccccgcatgtccacagccgggcaccgtccccactctacagcgtggagttctccgaggagcccttcggggtgatcgtgcgccggcagctggacggccgcgtgctgctgaacacgacggtggcgcccctgttctttgcggaccagttccttcagctgtccacctcgctgccctcgcagtatatcacaggcctcgccgagcacctcagtcccctgatgctcagcaccagctggaccaggatcaccctgtggaaccgggaccttgcgcccacgcccggtgcgaacctctacgggtctcaccctttctacctggcgctggaggacggcgggtcggcacacggggtgttcctgctaaacagcaatgccatggatgtggtcctgcagccgagccctgcccttagctggaggtcgacaggtgggatcctggatgtctacatcttcctgggcccagagcccaagagcgtggtgcagcagtacctggacgttgtgggatacccgttcatgccgccatactggggcctgggcttccacctgtgccgctggggctactcctccaccgctatcacccgccaggtggtggagaacatgaccagggcccacttccccctggacgtccagtggaacgacctggactacatggactcccggagggacttcacgttcaacaaggatggcttccgggacttcccggccatggtgcaggagctgcaccagggcggccggcgctacatgatgatcgtggatcctgccatcagcagctcgggccctgccgggagctacaggccctacgacgagggtctgcggaggggggttttcatcaccaacgagaccggccagccgctgattgggaaggtatggcccgggtccactgccttccccgacttcaccaaccccacagccctggcctggtgggaggacatggtggctgagttccatgaccaggtgcccttcgacggcatgtggattgacatgaacgagccttccaacttcatcaggggctctgaggacggctgccccaacaatgagctggagaacccaccctacgtgcctggggtggttggggggaccctccaggcggccaccatctgtgcctccagccaccagtttctctccacacactacaacctgcacaacctctacggcctgaccgaagccatcgcctcccacagggcgctggtgaaggctcgggggacacgcccatttgtgatctcccgctcgacctttgctggccacggccgatacgccggccactggacgggggacgtgtggagctcctgggagcagctcgcctcctccgtgccagaaatcctgcagtttaacctgctgggggtgcctctggtcggggccgacgtctgcggcttcctgggcaacacctcagaggagctgtgtgtgcgctggacccagctgggggccttctaccccttcatgcggaaccacaacagcctgctcagtctgccccaggagccgtacagcttcagcgagccggcccagcaggccatgaggaaggccctcaccctgcgctacgcactcctcccccacctctacacactgttccaccaggcccacgtcgcgggggagaccgtggcccggcccctcttcctggagttccccaaggactctagcacctggactgtggaccaccagctcctgtggggggaggccctgctcatcaccccagtgctccaggccgggaaggccgaagtgactggctacttccccttgggcacatggtacgacctgcagacggtgccagtagaggcccttggcagcctcccacccccacctgcagctccccgtgagccagccatccacagcgaggggcagtgggtgacgctgccggcccccctggacaccatcaacgtccacctccgggctgggtacatcatccccctgcagggccctggcctcacaaccacagagtcccgccagcagcccatggccctggctgtggccctgaccaagggtggggaggcccgaggggagcttttctgggacgatggagagagcctggaagtgctggagcgaggggcctacacacaggtcatcttcctggccaggaataacacgatcgtgaatgagctggtacgtgtgaccagtgagggagctggcctgcagctgcagaaggtgactgtcctgggcgtggccacggcgccccagcaggtcctctccaacggtgtccctgtctccaacttcacctacagccccgacaccaaggtcctggacatctgtgtctcgctgttgatgggagagcagtttctcgtcagctggtgt

SEQ ID NO: 5154 - DNA, 1206 bp, Homo Sapiens
aaagataacgccacgtgtgatggcccctgtgggttacggttcaggcaaaacccacagggtggtgtccgcatcgtcggcgggaaggctgcacagcatggggcctggccctggatggtcagcctccagatcttcacgtacaacagccacaggtaccacacatgtggaggcagcttgctgaattcacgatgggtgctcactgctgctcactgcttcgtcggcaaaaataatgtgcatgactggagactggttttcggagcaaaggaaattacatatgggaacaataaaccagtaaaggcgcctctgcaagagagatatgtggagaaaatcatcattcatgaaaaatacaactctgcgacagagggaaatgacattgccctcgtggagatcacccctcccatttcgtgtgggcgcttcattgggccgggctgcctgccccactttaaggcaggcctccccagaggctcccagagctgctgggtggccggctggggatatatagaagagaaagcccccaggccatcatctatactgatggaggcacgtgtggatctcatcgacctggacttgtgtaactcgacccagtggtacaatgggcgcgttcagccaaccaatgtgtgcgcggggtatcctgtaggcaagatcgacacctgccagggagacagcggcgggcctctcatgtgcaaagacagcaaggaaagcgcctatgtggtcgtgggaatcacaagctggggggtaggctgtgcccgtgccaagcgccccggaatctacacggccacctggccctatctgaactggatcgcctccaagattggttctaacgctttgcgtgtgattcaatcggccacccctccacctcccaccactcgaccgcccccgattcgaccccccttctcccaccctatctctgctcaccttccttggtatttccaaccgccccctcgaccacttccaccccgaccaccggcagcccagccccgacccccaccttcacccccgcccccacccccacctccagcctcacctttacccccacccccacccccacccccacctacaccctcatctaccacaaaacttccccaaggactttcttttgccaagcgcctacagcagctcatagaggtcttgaaggggaagacctattccgacggaaagaaccattatgacatggagaccacagagctcccagaactgacctcgacctcc

SEQ ID NO: 5155 - DNA, 894 bp, Homo Sapiens
ataccagttaaacaggctgattctggaagttctgaggaaaagcagctttacaacaaatacccagatgctgtggccacatggctaaaccctgacccatctcagaagcagaatctcctagccccacagaatgctgtgtcctctgaagaaaccaatgactttaaacaagagacccttccaagtaagtccaacgaaagccatgaccacatggatgatatggatgatgaagatgatgatgaccatgtggacagccaggactccattgactcgaacgactctgatgatgtagatgacactgatgattctcaccagtctgatgagtctcaccattctgatgaatctgatgaactggtcactgattttcccacggacctgccagcaaccgaagttttcactccagttgtccccacagtagacacatatgatggccgaggtgatagtgtggtttatggactgaggtcaaaatctaagaagtttcgcagacctgacatccagtaccctgatgctacagacgaggacatcacctcacacatggaaagcgaggagttgaatggtgcatacaaggccatccccgttgcccaggacctgaacgcgccttctgattgggacagccgtgggaaggacagttatgaaacgagtcagctggatgaccagagtgctgaaacccacagccacaagcagtccagattatataagcggaaagccaatgatgagagcaatgagcattccgatgtgattgatagtcaggaactttccaaagtcagccgtgaattccacagccatgaatttcacagccatgaagatatgctggttgtagaccccaaaagtaaggaagaagataaacacctgaaatttcgtatttctcatgaattagatagtgcatcttctgaggtcaat

SEQ ID NO: 5156 - DNA, 1356 bp, Homo Sapiens
gcccccgaccaggacgagatccagcgcctccccgggctggccaagcagccgtctttccgccagtactccggctacctcaaaggctccggctccaagcacctccactactggtttgtggagtcccagaaggatcccgagaacagccctgtggtgctttggctcaatgggggtcccggctgcagctcactagatgggctcctcacagagcatggccccttcctggtccagccagatggtgtcaccctggagtacaacccctattcttggaatctgattgccaatgtgttatacctggagtccccagctggggtgggcttctcctactccgatgacaagttttatgcaactaatgacactgaggtcgcccagagcaattttgaggcccttcaagatttcttccgcctctttccggagtacaagaacaacaaacttttcctgaccggggagagctatgctggcatctacatccccaccctggccgtgctggtcatgcaggatcccagcatgaaccttcaggggctggctgtgggcaatggactctcctcctatgagcagaatgacaactccctggtctactttgcctactaccatggccttctggggaacaggctttggtcttctctccagacccactgctgctctcaaaacaagtgtaacttctatgacaacaaagacctggaatgcgtgaccaatcttcaggaagtggcccgcatcgtgggcaactctggcctcaacatctacaatctctatgccccgtgtgctggaggggtgcccagccattttaggtatgagaaggacactgttgtggtccaggatttgggcaacatcttcactcgcctgccactcaagcggatgtggcatcaggcactgctgcgctcaggggataaagtgcgcatggaccccccctgcaccaacacaacagctgcttccacctacctcaacaacccgtacgtgcggaaggccctcaacatcccggagcagctgccacaatgggacatgtgcaactttctggtaaacttacagtaccgccgtctctaccgaagcatgaactcccagtatctgaagctgcttagctcacagaaataccagatcctattatataatggagatgtagacatggcctgcaatttcatgggggatgagtggtttgtggattccctcaaccagaagatggaggtgcagcgccggccctggttagtgaagtacggggacagcggggagcagattgccggcttcgtgaaggagttctcccacatcgcctttctcacgatcaagggcgccggccacatggttcccaccgacaagcccctcgctgccttcaccatgttctcccgcttcctgaacaagcagccatac

SEQ ID NO: 5157 - DNA, 339 bp, Homo Sapiens
ctccctgtgaacagccctatgaataaaggggataccgaggtgatgaaatgcatcgttgaggtcatctccgacacactttccaagcccagccccatgcctgtcagccaggaatgttttgagacactccgaggagatgaacggatcctttccattctgagacatcagaatttactgaaggagctccaagacctcgctctccaaggcgccaaggagagggcacatcagcagaagaaacacagcggttttgaagatgaactctcagaggttcttgagaaccagagcagccaggccgagctgaaagaggcggtggaagagccatcatccaaggatgttatggag

SEQ ID NO: 5158 - DNA, 1452 bp, Homo Sapiens
atcatcccagttgaggaggagaacccggacttctggaaccgcgaggcagccgaggccctgggtgccgccaagaagctgcagcctgcacagacagccgccaagaacctcatcatcttcctgggcgatgggatgggggtgtctacggtgacagctgccaggatcctaaaagggcagaagaaggacaaactggggcctgagttacccctggccatggaccgcttcccatatgtggctctgtccaagacatacaatgtagacaaacatgtgccagacagtggagccacagccacggcctacctgtgcggggtcaagggcaacttccagaccattggcttgagtgcagccgcccgctttaaccagtgcaacacgacacgcggcaacgaggtcatctccgtgatgaatcgggccaagaaagcagggaagtcagtgggagtggtaaccaccacacgagtgcagcacgcctcgccagccggcacctacgcccacacggtgaaccgcaactggtactcggacgccgacgtgcctgcctcggcccgccaggaggggtgccaggacatcgctacgcagctcatctccaacatggacattgacgtgatcctaggtggaggccgaaagtacatgtttcgcatgggaaccccagaccctgagtacccagatgactacagccaaggtgggaccaggctggacgggaagaatctggtgcaggaatggctggcgaagcgccagggtgcccggtacgtgtggaaccgcactgagctcatgcaggcttccctggacccgtctgtgacccatctcatgggtctctttgagcctggagacatgaaatacgagatccaccgagactccacactggacccctccctgatggagatgacagaggctgccctgcgcctgctgagcaggaacccccgcggcttcttcctcttcgtggagggtggtcgcatcgaccatggtcatcatgaaagcagggcttaccgggcactgactgagacgatcatgttcgacgacgccattgagagggcgggccagctcaccagcgaggaggacacgctgagcctcgtcactgccgaccactcccacgtcttctccttcggaggctaccccctgcgagggagctccatcttcgggctggcccctggcaaggcccgggacaggaaggcctacacggtcctcctatacggaaacggtccaggctatgtgctcaaggacggcgcccggccggatgttaccgagagcgagagcgggagccccgagtatcggcagcagtcagcagtgcccctggacgaagagacccacgcaggcgaggacgtggcggtgttcgcgcgcggcccgcaggcgcacctggttcacggcgtgcaggagcagaccttcatagcgcacgtcatggccttcgccgcctgcctggagccctacaccgcctgcgacctggcgccccccgccggcaccaccgac

SEQ ID NO: 5159 - DNA, 222 bp, Homo Sapiens
ttcgccagagctgaagctgaagaagatggggacctgcagtgcctgtgtgtgaagaccacctcccaggtccgtcccaggcacatcaccagcctggaggtgatcaaggccggaccccactgccccactgcccaactcatagccacgctgaagaatgggaggaaaatttgcttggatctgcaagccctgctgtacaagaaaatcattaaggaacatttggagagt

SEQ ID NO: 5160 - DNA, 1281 bp, Homo Sapiens
gaccagacggtctcagacaatgagctccaggaaatgtccaatcagggaagtaagtacgtcaataaggaaattcaaaatgctgtcaacggggtgaaacagataaagactctcatagaaaaaacaaacgaagagcgcaagacactgctcagcaacctagaagaagccaagaagaagaaagaggatgccctaaatgagaccagggaatcagagacaaagctgaaggagctcccaggagtgtgcaatgagaccatgatggccctctgggaagagtgtaagccctgcctgaaacagacctgcatgaagttctacgcacgcgtctgcagaagtggctcaggcctggttggccgccagcttgaggagttcctgaaccagagctcgcccttctacttctggatgaatggtgaccgcatcgactccctgctggagaacgaccggcagcagacgcacatgctggatgtcatgcaggaccacttcagccgcgcgtccagcatcatagacgagctcttccaggacaggttcttcacccgggagccccaggatacctaccactacctgcccttcagcctgccccaccggaggcctcacttcttctttcccaagtcccgcatcgtccgcagcttgatgcccttctctccgtacgagcccctgaacttccacgccatgttccagcccttccttgagatgatacacgaggctcagcaggccatggacatccacttccatagcccggccttccagcacccgccaacagaattcatacgagaaggcgacgatgaccggactgtgtgccgggagatccgccacaactccacgggctgcctgcggatgaaggaccagtgtgacaagtgccgggagatcttgtctgtggactgttccaccaacaacccctcccaggctaagctgcggcgggagctcgacgaatccctccaggtcgctgagaggttgaccaggaaatacaacgagctgctaaagtcctaccagtggaagatgctcaacacctcctccttgctggagcagctgaacgagcagtttaactgggtgtcccggctggcaaacctcacgcaaggcgaagaccagtactatctgcgggtcaccacggtggcttcccacacttctgactcggacgttccttccggtgtcactgaggtggtcgtgaagctctttgactctgatcccatcactgtgacggtccctgtagaagtctccaggaagaaccctaaatttatggagaccgtggcggagaaagcgctgcaggaataccgcaaaaagcaccgggaggag

SEQ ID NO: 5161 - DNA, 1908 bp, Homo Sapiens
gaggaggaggacaagaaggaggacgtgggcacggtggtcggcatcgacctggggaccacctactcctgcgtcggcgtgttcaagaacggccgcgtggagatcatcgccaacgatcagggcaaccgcatcacgccgtcctatgtcgccttcactcctgaaggggaacgtctgattggcgatgccgccaagaaccagctcacctccaaccccgagaacacggtctttgacgccaagcggctcatcggccgcacgtggaatgacccgtctgtgcagcaggacatcaagttcttgccgttcaaggtggttgaaaagaaaactaaaccatacattcaagttgatattggaggtgggcaaacaaagacatttgctcctgaagaaatttctgccatggttctcactaaaatgaaagaaaccgctgaggcttatttgggaaagaaggttacccatgcagttgttactgtaccagcctattttaatgatgcccaacgccaagcaaccaaagacgctggaactattgctggcctaaatgttatgaggatcatcaacgagcctacggcagctgctattgcttatggcctggataagagggagggggagaagaacatcctggtgtttgacctgggtggcggaaccttcgatgtgtctcttctcaccattgacaatggtgtcttcgaagttgtggccactaatggagatactcatctgggtggagaagactttgaccagcgtgtcatggaacacttcatcaaactgtacaaaaagaagacgggcaaagatgtcaggaaagacaatagagctgtgcagaaactccggcgcgaggtagaaaaggccaaacgggccctgtcttctcagcatcaagcaagaattgaaattgagtccttctatgaaggagaagacttttctgagaccctgactcgggccaaatttgaagagctcaacatggatctgttccggtctactatgaagcccgtccagaaagtgttggaagattctgatttgaagaagtctgatattgatgaaattgttcttgttggtggctcgactcgaattccaaagattcagcaactggttaaagagttcttcaatggcaaggaaccatcccgtggcataaacccagatgaagctgtagcgtatggtgctgctgtccaggctggtgtgctctctggtgatcaagatacaggtgacctggtactgcttgatgtatgtccccttacacttggtattgaaactgtgggaggtgtcatgaccaaactgattccaaggaacacagtggtgcctaccaagaagtctcagatcttttctacagcttctgataatcaaccaactgttacaatcaaggtctatgaaggtgaaagacccctgacaaaagacaatcatcttctgggtacatttgatctgactggaattcctcctgctcctcgtggggtcccacagattgaagtcacctttgagatagatgtgaatggtattcttcgagtgacagctgaagacaagggtacagggaacaaaaataagatcacaatcaccaatgaccagaatcgcctgacacctgaagaaatcgaaaggatggttaatgatgctgagaagtttgctgaggaagacaaaaagctcaaggagcgcattgatactagaaatgagttggaaagctatgcctattctctaaagaatcagattggagataaagaaaagctgggaggtaaactttcctctgaagataaggagaccatggaaaaagctgtagaagaaaagattgaatggctggaaagccaccaagatgctgacattgaagacttcaaagctaagaagaaggaactggaagaaattgttcaaccaattatcagcaaactctatggaagtgcaggccctcccccaactggtgaagaggatacagcagaaaaagatgagttg

SEQ ID NO: 5162 - DNA, 1431 bp, Homo Sapiens
cttggacaaagcctgaaaccagagccatttggaagaagagctcaagctgttgaaacaaacaaaacgctgcatgagatgaagaccagattcctgctctttggagaaaccaatcagggctgtcagattcgaatcaatcatccggacacgttacaggagtgcggcttcaactcctccctgcctctggtgatgataatccacgggtggtcggtggacggcgtgctagaaaactggatctggcagatggtggccgcgctgaagtctcagccggcccagccagtgaacgtggggctggtggactggatcaccctggcccacgaccactacaccatcgccgtccgcaacacccgccttgtgggcaaggaggtcgcggctcttctccggtggctggaggaatctgttcaactctctcgaagccatgttcacctaattgggtacagcctgggtgcacacgtgtcaggatttgccggcagttccatcggtggaacgcacaagattgggagaatcacagggctggatgccgcgggacctttgtttgagggaagtgcccccagcaatcgtctttctccagatgatgccaattttgtggatgccattcatacctttacgcgggagcacatgggcctgagcgtgggcatcaaacagcccataggacactatgacttctatcccaacgggggctccttccagcctggctgccacttcctagagctctacagacatattgcccagcacggcttcaatgccatcacccagaccataaaatgctcccacgagcgatcggtgcaccttttcatcgactccttgctgcacgccggcacgcagagcatggcctacccgtgtggtgacatgaacagcttcagccagggcctgtgcctgagctgcaagaagggccgctgcaacacgctgggctaccacgtccgccaggagccgcggagcaagagcaagaggctcttcctcgtaacgcgagcccagtcccccttcaaagtttatcattaccagttaaagatccagttcatcaaccaaactgagacgccaatacaaacaacttttaccatgtcactactcggaacaaaagagaaaatgcagaaaattcccatcactctgggcaaaggaattgctagtaataaaacgtattcctttcttatcacgctggatgtggatatcggcgagctgatcatgatcaagttcaagtgggaaaacagtgcagtgtgggccaatgtctgggacacggtccagaccatcatcccatggagcacagggccgcgccactcaggcctcgttctgaagacgatcagagtcaaagcaggagaaacccagcaaagaatgacattttgttcagaaaacacagatgacctactacttcgcccaacccaggaaaaaatcttcgtgaaatgtgaaataaagtctaaaacatcaaagcgaaagatcaga

SEQ ID NO: 5163 - DNA, 663 bp, Homo Sapiens
tcggaggcggagggtcgactccgggagaaacttttctctggctatgatagctccgtgcggccagcgcgggaggtgggagaccgtgtcagggtcagcgttggtctcatcctggcgcaactcatcagcctgaacgagaaggatgaagagatgagcacaaaggtgtacttagacctggagtggactgactacaggctgagctgggaccctgcggagcacgacggcatcgattcgctccgcatcacggcggaatccgtgtggctccctgacgtggtgctactgaacaacaatgatgggaattttgacgtggctctggacattagcgtcgtggtgtcctccgacggctccgtgcgttggcaacccccgggcatctatcgcagcagctgcagcatccaggtcacctacttccccttcgactggcagaattgcactatggtgttcagctcctacagctacgacagctcggaggtcagcctgcagacaggcctgggtcctgacgggcaagggcatcaggaaatccacattcatgaagggactttcattgagaatggccagtgggagattatccacaagccctctcggctaatccagcctccaggcgatcctaggggagggagggaaggacagcgccaggaagtcatcttctacctcatcatccgccgcaag

SEQ ID NO: 5164 - DNA, 1428 bp, Homo Sapiens
tgctccaaaggcacctcgcacgaggcaggcatcgtgtgccgcatcaccaagcctgccctcctggtgttgaaccacgagactgccaaggtgatccagaccgccttccagcgagccagctacccagatatcacgggcgagaaggccatgatgctccttggccaagtcaagtatgggttgcacaacatccagatcagccacttgtccatcgccagcagccaggtggagctggtggaagccaagtccattgatgtctccattcagaacgtgtctgtggtcttcaaggggaccctgaagtatggctacaccactgcctggtggctgggtattgatcagtccattgacttcgagatcgactctgccattgacctccagatcaacacacagctgacctgtgactctggtagagtgcggaccgatgcccctgactgctacctgtctttccataagctgctcctgcatctccaaggggagcgagagcctgggtggatcaagcagctgttcacaaatttcatctccttcaccctgaagctggtcctgaagggacagatctgcaaagagatcaacgtcatctctaacatcatggccgattttgtccagacaagggctgccagcatcctttcagatggagacattggggtggacatttccctgacaggtgatcccgtcatcacagcctcctacctggagtcccatcacaagggtcatttcatctacaagaatgtctcagaggacctccccctccccaccttctcgcccacactgctgggggactcccgcatgctgtacttctggttctctgagcgagtcttccactcgctggccaaggtagctttccaggatggccgcctcatgctcagcctgatgggagacgagttcaaggcagtgctggagacctggggcttcaacaccaaccaggaaatcttccaagaggttgtcggcggcttccccagccaggcccaagtcaccgtccactgcctcaagatgcccaagatctcctgccaaaacaagggagtcgtggtcaattcttcagtgatggtgaaattcctctttccacgcccagaccagcaacattctgtagcttacacatttgaagaggatatcgtgactaccgtccaggcctcctattctaagaaaaagctcttcttaagcctcttggatttccagattacaccaaagactgtttccaacttgactgagagcagctccgagtccatccagagcttcctgcagtcaatgatcaccgctgtgggcatccctgaggtcatgtctcggctcgaggtagtgtttacagccctcatgaacagcaaaggcgtgagcctcttcgacatcatcaaccctgagattatcactcgagatggcttcctgctgctgcagatggactttggcttccctgagcacctgctggtggatttcctccagagcttgagc

SEQ ID NO: 5165 - DNA, 210 bp, Homo Sapiens
gagatctgcccgagctttcagcgtgtcatcgaaaccctcctcatggacacaccctccagttatgaggctgccatggaacttttcagccctgatcaagacatgagggaggcaggggctcagctgaagaagctggtggacaccctcccccaaaagcccagagaaagcatcattaagctcatggaaaaaatagcccaaagctcactgtgtaat

SEQ ID NO: 5166 - DNA, 378 bp, Homo Sapiens
cagccggtgctgcatcagccgccggccatgtcctcggcccttggaaccacaatccgcctcacctgcaccctgaggaacgaccatgacatcggtgtgtacagcgtctactggtaccagcagaggccgggccaccctcccaggttcctgctgagatatttctcacaatcagacaagagccagggcccccaggtcccccctcgcttctctggatccaaagatgtggccaggaacagggggtatttgagcatctctgagctgcagcctgaggacgaggctatgtattactgtgctatgggggcccgcagctcggagaaggaggagagggagagggagtgggaggaagaaatggaacccactgcagccaggacacgtgtccct

SEQ ID NO: 5167 - DNA, 2997 bp, Homo Sapiens
cagcagcaggaggtcatctcgccggacactaccgagagaaacaacaactgcccagagaagaccgactgccccatccacgtgtacttcgtgctggacacctcggagagcgtcaccatgcagtcccccacggacatcctgctcttccacatgaagcagttcgtgccgcagttcatcagccagctgcagaacgagttctacctggaccaggtggcgctgagctggcgctacggcggcctgcacttctctgaccaggtggaggtgttcagcccaccgggcagcgaccgggcctccttcatcaagaacctgcagggcatcagctccttccgccgcggcaccttcaccgactgcgcgctggccaacatgacggagcagatccggcaggaccgcagcaagggcaccgtccacttcgccgtggtcatcaccgacggccacgtcaccggcagcccctgcgggggcatcaagctgcaggccgagcgggcccgcgaggagggcatccggctcttcgccgtggcccccaaccagaacctgaaggagcagggcctgcgggacatcgccagcacgccgcacgagctctaccgcaacgactacgccaccatgctgcccgactccaccgagatcgaccaggacaccatcaaccgcatcatcaaggtcatgaaacacgaagcctacggagagtgctacaaggtgagctgcctggaaatccctgggccctctggccccaagggctaccgtggacagaagggtgccaagggcaacatgggtgagccgggagagcctggccagaagggaagacagggagacccgggcatcgaaggccccattggattcccaggacccaagggcgttcctggcttcaaaggagagaagggtgaatttggagccgacggtcgcaagggggcccctggcctggctggcaagaacgggaccgatggacagaagggcaagctggggcgcatcggacctcctggctgcaagggagaccctggaaaccggggccccgacggttacccgggggaagcagggagtccaggggagcgaggagaccaaggcggcaagggggaccctggccgcccaggacgcagagggcccccgggagaaatcggggccaagggaagcaaggggtatcaaggcaacaatggagccccaggaagtcctggtgtgaaaggagccaagggcgggcctgggccccgcggacccaaaggcgagccggggcgcaggggagaccccggcaccaagggcagcccaggcagcgatggccccaagggggagaagggggaccctggccctgaggggccccgcggcctggctggagaggttggcaacaaaggagccaagggagaccgaggcttgcctggacccagaggcccccagggagctcttggggagcccggaaagcagggatctcggggagaccccggtgatgcaggaccccgtggagactcaggacagccaggccccaagggagaccccggcaggcctggattcagctacccaggaccccgaggagcacccggagaaaaaggcgagcccggcccacgcggccccgagggaggccgaggcgactttggcttgaaaggagaacctgggaggaaaggagagaaaggagagcctgcggatcctggtccccctggtgagccaggccctcgggggccaagaggagtcccaggacccgagggtgagcccggcccccctggagaccccggtctcacggagtgtgacgtcatgacctacgtgagggagacctgcgggtgctgcgactgtgagaagcgctgtggcgccctggacgtggtcttcgtcatcgacagctccgagagcattgggtacaccaacttcacactggagaagaacttcgtcatcaacgtggtcaacaggctgggtgccatcgctaaggaccccaagtccgagacagggacgcgtgtgggcgtggtgcagtacagccacgagggcacctttgaggccatccagctggacgacgaacgtatcgactccctgtcgagcttcaaggaggctgtcaagaacctcgagtggattgcgggcggcacctggacaccctcagccctcaagtttgcctacgaccgcctcatcaaggagagccggcgccagaagacacgtgtgtttgcggtggtcatcacggacgggcgccacgaccctcgggacgatgacctcaacttgcgggcgctgtgcgaccgcgacgtcacagtgacggccatcggcatcggggacatgttccacgagaagcacgagagtgaaaacctctactccatcgcctgcgacaagccacagcaggtgcgcaacatgacgctgttctccgacctggtcgctgagaagttcatcgatgacatggaggacgtcctctgcccggaccctcagatcgtgtgcccagaccttccctgccaaacagagctgtccgtggcacagtgcacgcagcggcccgtggacatcgtcttcctgctggacggctccgagcggctgggtgagcagaacttccacaaggcccggcgcttcgtggagcaggtggcgcggcggctgacgctggcccggagggacgacgaccctctcaacgcacgcgtggcgctgctgcagtttggtggccccggcgagcagcaggtggccttcccgctgagccacaacctcacggccatccacgaggcgctggagaccacgcaatacctgaactccttctcgcacgtgggcgcaggcgtggtgcacgccatcaatgccatcgtgcgcagcccgcgtggcggggcccggaggcacgcagagctgtccttcgtgttcctcacggacggcgtcacgggcaacgacagtctgcacgagtcggcgcactccatgcgcaagcagaacgtggtacccaccgtgctggccttgggcagcgacgtggacatggacgtgctcaccacgctcagcctgggtgaccgtgccgccgtgttccacgagaaggactatgacagcctggcgcaacccggcttcttcgaccgcttcatccgctggatctgc

SEQ ID NO: 5168 - DNA, 1941 bp, Homo Sapiens
aacagaagaaattattacattgctgctgaagaaatatcctgggattattcagaatttgtacaaagggaaacagatattgaagactctgatgatattccagaagataccacatataagaaagtagtttttcgaaagtacctcgacagcacttttaccaaacgtgatcctcgaggggagtatgaagagcatctcggaattcttggtcctattatcagagctgaagtggatgatgttatccaagttcgttttaaaaatttagcatccagaccgtattctctacatgcccatggactttcctatgaaaaatcatcagagggaaagacttatgaagatgactctcctgaatggtttaaggaagataatgctgttcagccaaatagcagttatacctacgtatggcatgccactgagcgatcagggccagaaagtcctggctctgcctgtcgggcttgggcctactactcagctgtgaacccagaaaaagatattcactcaggcttgataggtcccctcctaatctgccaaaaaggaatactacataaggacagcaacatgcctatggacatgagagaatttgtcttactatttatgacctttgatgaaaagaagagctggtactatgaaaagaagtcccgaagttcttggagactcacatcctcagaaatgaaaaaatcccatgagtttcacgccattaatgggatgatctacagcttgcctggcctgaaaatgtatgagcaagagtgggtgaggttacacctgctgaacataggcggctcccaagacattcacgtggttcactttcacggccagaccttgctggaaaatggcaataaacagcaccagttaggggtctggccccttctgcctggttcatttaaaactcttgaaatgaaggcatcaaaacctggctggtggctcctaaacacagaggttggagaaaaccagagagcagggatgcaaacgccatttcttatcatggacagagactgtaggatgccaatgggactaagcactggtatcatatctgattcacagatcaaggcttcagagtttctgggttactgggagcccagattagcaagattaaacaatggtggatcttataatgcttggagtgtagaaaaacttgcagcagaatttgcctctaaaccttggatccaggtggacatgcaaaaggaagtcataatcacagggatccagacccaaggtgccaaacactacctgaagtcctgctataccacagagttctatgtagcttacagttccaaccagatcaactggcagatcttcaaagggaacagcacaaggaatgtgatgtattttaatggcaattcagatgcctctacaataaaagagaatcagtttgacccacctattgtggctagatatattaggatctctccaactcgagcctataacagacctacccttcgattggaactgcaaggttgtgaggtaaatggatgttccacacccctgggtatggaaaatggaaagatagaaaacaagcaaatcacagcttcttcgtttaagaaatcttggtggggagattactgggaacccttccgtgcccgtctgaatgcccagggacgtgtgaatgcctggcaagccaaggcaaacaacaataagcagtggctagaaattgatctactcaagatcaagaagataacggcaattataacacagggctgcaagtctctgtcctctgaaatgtatgtaaagagctataccatccactacagtgagcagggagtggaatggaaaccatacaggctgaaatcctccatggtggacaagatttttgaaggaaatactaataccaaaggacatgtgaagaactttttcaaccccccaatcatttccaggtttatccgtgtcattcctaaaacatggaatcaaagtattgcacttcgcctggaactctttggctgtgatatttac

SEQ ID NO: 5169 - DNA, 417 bp, Homo Sapiens
gctgtgtctgaacatcagctcctccatgacaaggggaagtccatccaagatttacggcgacgattcttccttcaccatctgatcgcagaaatccacacagctgaaatcagagctacctcggaggtgtcccctaactccaagccctctcccaacacaaagaaccaccccgtccgatttgggtctgatgatgagggcagatacctaactcaggaaactaacaaggtggagacgtacaaagagcagccgctcaagacacctgggaagaaaaagaaaggcaagcccgggaaacgcaaggagcaggaaaagaaaaaacggcgaactcgctctgcctggttagactctggagtgactgggagtgggctagaaggggaccacctgtctgacacctccacaacgtcgctggagctcgattcacgg

SEQ ID NO: 5170 - DNA, 702 bp, Homo Sapiens
attattggaggaaatgaagtaactcctcattcaagaccctacatggtcctacttagtcttgacagaaaaaccatctgtgctggggctttgattgcaaaagactgggtgttgactgcagctcactgtaacttgaacaaaaggtcccaggtcattcttggggctcactcaataaccagggaagagccaacaaaacagataatgcttgttaagaaagagtttccctatccatgctatgacccagccacacgcgaaggtgaccttaaacttttacagctgacggaaaaagcaaaaattaacaaatatgtgactatccttcatctacctaaaaagggggatgatgtgaaaccaggaaccatgtgccaagttgcagggtggggcaggactcacaatagtgcatcttggtccgatactctgagagaagtcaatatcaccatcatagacagaaaagtctgcaatgatcgaaatcactataattttaaccctgtgattggaatgaatatggtttgtgctggaagcctccgaggtggaagagactcgtgcaatggagattctggaagccctttgttgtgcgagggtgttttccgaggggtcacttcctttggccttgaaaataaatgcggagaccctcgtgggcctggtgtctatattcttctctcaaagaaacacctcaactggataattatgactatcaagggagcagtt

SEQ ID NO: 5171 - DNA, 399 bp, Homo Sapiens
agacccccacagtttacgagggctcagtggtttgccatccagcacatcagtctgaacccccctcgatgcaccattgcaatgcgggcaattaacaattatcgatggcgttgcaaaaaccaaaatacttttcttcgtacaacttttgctaatgtagttaatgtttgtggtaaccaaagtatacgctgccctcataacagaactctcaacaattgtcatcggagtagattccgggtgcctttactccactgtgacctcataaatccaggtgcacagaatatttcaaactgcaggtatgcagacagaccaggaaggaggttctatgtagttgcatgtgacaacagagatccacgggattctccacggtatcctgtggttccagttcacctggataccaccatc

SEQ ID NO: 5172 - DNA, 270 bp, Homo Sapiens
ttcgtccccatcttcacctatggcgaactccagaggatgcaggaaaaggaacggaataaagggcaaaagaaatccctgagtgtatggcagaggtctggggaggaaggtcctgtagaccctgcggagcccatcagggaagaagaaaacgaaatgatcaagctgactgctcctctggaaattggaatgaggatgaactccagacagctggaaaagtacccggccaccctggaagggctgctgagtgagatgcttccccagcatgcagccaag

SEQ ID NO: 5173 - DNA, 525 bp, Homo Sapiens
aatgcaccgcttgtcaatgtgaccctctactatgaagcactgtgcggtggctgccgagccttcctgatccgggagctcttcccaacatggctgttggtcatggagatcctcaatgtcacgctggtgccctacggaaacgcacaggaacaaaatgtcagtggcaggtgggagttcaagtgccagcatggagaagaggagtgcaaattcaacaaggtggaggcctgcgtgttggatgaacttgacatggagctagccttcctgaccattgtctgcatggaagagtttgaggacatggagagaagtctgccactatgcctgcagctctacgccccagggctgtcgccagacactatcatggagtgtgcaatgggggaccgcggcatgcagctcatgcacgccaacgcccagcggacagatgctctccagccaccacacgagtatgtgccctgggtcaccgtcaatgggaaacccttggaagatcagacccagctccttacccttgtctgccagttgtaccagggcaag

SEQ ID NO: 5174 - DNA, 1761 bp, Homo Sapiens
cagagaaaccagctgcttcagaaagaaccagacctcaggttggaaaatgtccaaaagtttcccagtcctgaaatgatcagggctttggagtacatagaaaacctccgacaacaagctcataaggaagaaagcagcccagattataatccctaccaaggtgtctctgtcccccttcagcaaaaagaaaatggcgatgaaagccacttgcccgagagggattcactgagtgaagaagactggatgagaataatactcgaagctttgagacaggctgaaaatgagcctcagtctgcaccaaaagaaaataagccctatgccttgaattcagaaaagaactttccaatggacatgagtgatgattatgagacacagcagtggccagaaagaaagcttaagcacatgcaattccctcctatgtatgaagagaattccagggataacccctttaaacgcacaaatgaaatagtggaggaacaatatactcctcaaagccttgctacattggaatctgtcttccaagagctggggaaactgacaggaccaaacaaccagaaacgtgagaggatggatgaggagcaaaaactttatacggatgatgaagatgatatctacaaggctaataacattgcctatgaagatgtggtcgggggagaagactggaacccagtagaggagaaaatagagagtcaaacccaggaagaggtgagagacagcaaagagaatatagaaaaaaatgaacaaatcaatgatgagatgaaacgctcagggcagcttggcatccaggaagaaggtcttcggaaagagagtaaagaccaactctcagatgatgtctccaaagtaattgcctatttgaaaaggttagtaaatgctgcaggaagtgggaggttacagaatgggcaaaatggggaaagggccaccaggctttttgagaaacctcttgattctcagtctatttatcagctgattgaaatctcaaggaatttacagatacccccagaagacttaattgagatgctcaaaactggggagaagccgaatggatcagtggaaccggagcgggagcttgaccttcctgttgacctagatgacatctcagaggctgacttagaccatccagacctgttccaaaataggatgctctccaagagtggctaccctaaaacacctggtggtgctgggactgaggccctaccagacgggctcagtgttgaggatattttaaatcttttagggatggagagtgcagcaaatcagaaaacgtcgtattttcccaatccatataaccaggagaaagttctgccaaggctcccttatggtgctggaagatctagatcgaaccagcttcccaaagctgcctggattccacatgttgaaaacagacagatggcatatgaaaacctgaacgacaaggatcaagaattaggtgagtacttggccaggatgctagttaaataccctgagatcattaattcaaaccaagtgaagcgagttcctggtcaaggctcatctgaaggtgacctgcaggaagaggaacaaattgagcaggccatcaaagagcatttgaatcaaggcagctctcaggagactgacaagctggccccggtgagcaaaaggttccctgtggggcccccgaagaatgatgataccccaaataggcagtactgggatgaagatctgttaatgaaagtgctggaatacctcaaccaagaaaaggcagaaaagggaagggagcatattgctaagagagcaatggaaaatatg

SEQ ID NO: 5175 - DNA, 156 bp, Homo Sapiens
ttctcttactttgtgatcctggcagaaaatggcttcttgcccggcaacctggtgggcatccggctgaactgggatgaccgcaccgtcaatgacctggaagacagttacgggcagcagtggacatacgagcagaggaaggtggtggagttcacctgc

SEQ ID NO: 5176 - DNA, 1875 bp, Homo Sapiens
gtggcgggtgccgagggcccggacgaggattcttctaacagagaaaatgccattgaggatgaagaggaggaggaggaggaagatgatgatgaggaagaagacgacttggaagttaaggaagaaaatggagtcttggtcctaaatgatgcaaactttgataattttgtggctgacaaagacacagtgctgctggagttttatgctccatggtgtggacattgcaagcagtttgctccggaatatgaaaaaattgccaacatattaaaggataaagatcctcccattcctgttgccaagatcgatgcaacctcagcgtctgtgctggccagcaggtttgatgtgagtggctaccccaccatcaagatccttaagaaggggcaggctgtagactacgagggctccagaacccaggaagaaattgttgccaaggtcagagaagtctcccagcccgactggacgcctccaccagaagtcacgcttgtgttgaccaaagagaactttgatgaagttgtgaatgatgcagatatcattctggtggagttttatgccccatggtgtggacactgcaagaaacttgcccccgagtatgagaaggccgccaaggagctcagcaagcgttctcctccaattcccctggcaaaggtcgacgccaccgcagaaacagacctggccaagaggtttgatgtctctggctatcccaccctgaaaattttccgcaaaggaaggccttatgactacaacggcccacgagaaaaatatggaatcgttgattacatgatcgagcagtccgggcctccctccaaggagattctgaccctgaagcaggtccaggagttcctgaaggatggagacgatgtcatcatcatcggggtctttaagggggagagtgacccagcctaccagcaataccaggatgccgctaacaacctgagagaagattacaaatttcaccacactttcagcacagaaatagcaaagttcttgaaagtctcccaggggcagttggttgtaatgcagcctgagaaattccagtccaagtatgagccccggagccacatgatggacgtccagggctccacccaggactcggccatcaaggacttcgtgctgaagtacgccctgcccctggttggccaccgcaaggtgtcaaacgatgctaagcgctacaccaggcgccccctggtggtcgtctactacagtgtggacttcagctttgattacagagctgcaactcagttttggcggagcaaagtcctagaggtggccaaggatttccctgagtacacctttgccattgcggacgaagaggactatgctggggaggtgaaggacctggggctcagcgagagtggggaggatgtcaatgccgccatcctggacgagagtgggaagaagttcgccatggagccagaggagtttgactctgacaccctccgcgagtttgtcactgctttcaaaaaaggaaaactgaagccagtcatcaaatcccagccagtgcccaagaacaacaagggacccgtcaaggtcgtggtgggaaagacctttgactccattgtgatggaccccaagaaggacgtcctcatcgagttctacgcgccatggtgcgggcactgcaagcagctagagcccgtgtacaacagcctggccaagaagtacaagggccaaaagggcctggtcatcgccaagatggacgccactgccaacgacgtccccagcgaccgctataaggtggagggcttccccaccatctacttcgcccccagtggggacaaaaagaacccagttaaatttgagggtggagacagagatctggagcatttgagcaagtttatagaagaacatgccacaaaactgagcaggaccaaggaagagctt

SEQ ID NO: 5177 - DNA, 1551 bp, Homo Sapiens
catccaggcttttttacttcaattggtcagatgactgatttgatccatactgagaaagatctggtgacttctctgaaagattatattaaggcagaagaggacaagttagaacaaataaaaaaatgggcagagaagttagatcggctaactagtacagcgacaaaagatccagaaggatttgttgggcatccagtaaatgcattcaaattaatgaaacgtctgaatactgagtggagtgagttggagaatctggtccttaaggatatgtcagatggctttatctctaacctaaccattcagagacagtactttcctaatgatgaagatcaggttggggcagccaaagctctgttacgtctccaggatacctacaatttggatacagataccatctcaaagggtaatcttccaggagtgaaacacaaatcttttctaacggctgaggactgctttgagttgggcaaagtggcctatacagaagcagattattaccatacggaactgtggatggaacaagccctaaggcaactggatgaaggcgagatttctaccatagataaagtctctgttctagattatttgagctatgcggtatatcagcagggagacctggataaggcacttttgctcacaaagaagcttcttgaactagatcctgaacatcagagagctaatggtaacttaaaatattttgagtatataatggctaaagaaaaagatgtcaataagtctgcttcagatgaccaatctgatcagaaaactacaccaaagaaaaaaggggttgctgtggattacctgccagagagacagaagtacgaaatgctgtgccgtggggagggtatcaaaatgacccctcggagacagaaaaaactcttttgccgctaccatgatggaaaccgtaatcctaaatttattctggctccagctaaacaggaggatgaatgggacaagcctcgtattattcgcttccatgatattatttctgatgcagaaattgaaatcgtcaaagacctagcaaaaccaaggctgaggcgagccaccatttcaaacccaataacaggagacttggagacggtacattacagaattagcaaaagtgcctggctctctggctatgaaaatcctgtggtgtctcgaattaatatgagaatacaagatctaacaggactagatgtttccacagcagaggaattacaggtagcaaattatggagttggaggacagtatgaaccccattttgactttgcacggaaagatgagccagatgctttcaaagagctggggacaggaaatagaattgctacatggctgttttatatgagtgatgtgtctgcaggaggagccactgtttttcctgaagttggagctagtgtttggcccaaaaaaggaactgctgttttctggtataatctgtttgccagtggagaaggagattatagtacacggcatgcagcctgtccagtgctagttggcaacaaatgggtatccaataaatggctccatgaacgtggacaagaatttcgaagaccttgtacgttgtcagaattggaa

SEQ ID NO: 5178 - DNA, 912 bp, Homo Sapiens
gccacccctgccctgcgctttgtagccgtgggtgactggggaggggtccccaatgccccattccacacggcccgggaaatggccaatgccaaggagatcgctcggactgtgcagatcctgggtgcagacttcatcctgtctctaggggacaatttttacttcactggtgtgcaagacatcaatgacaagaggttccaggagacctttgaggacgtattctctgaccgctcccttcgcaaagtgccctggtacgtgctagccggaaaccatgaccaccttggcaatgtctctgcccagattgcatactctaagatctccaagcgctggaacttccccagccctttctaccgcctgcacttcaagatcccacagaccaatgtgtctgtggccatttttatgctggacacagtgacactatgtggcaactcagatgacttcctcagccagcagcctgagaggccccgagacgtgaagctggcccgcacacagctgtcctggctcaagaaacagctggcggcggccagggaggactacgtgctggtggctggccactaccccgtgtggtccatagccgagcacgggcctacccactgcctggtcaagcagctacggccactgctggccacatacggggtcactgcctacctgtgcggccacgatcacaatctgcagtacctgcaagatgagaatggcgtgggctacgtgctgagtggggctgggaatttcatggacccctcaaagcggcaccagcgcaaggtccccaacggctatctgcgcttccactatgggactgaagactcactgggtggctttgcctatgtggagatcagctccaaagagatgactgtcacttacatcgaggcctcgggcaagtccctctttaagaccaggctgccgaggcgagccaggccc

SEQ ID NO: 5179 - DNA, 588 bp, Homo Sapiens
gcggctataggcagctgctcgaaagagtaccgcgtgctccttggccagctccagaagcagacagatctcatgcaggacaccagcagactcctggacccctatatacgtatccaaggcctggatgttcctaaactgagagagcactgcagggagcgccccggggccttccccagtgaggagaccctgagggggctgggcaggcggggcttcctgcagaccctcaatgccacactgggctgcgtcctgcacagactggccgacttagagcagcgcctccccaaggcccaggatttggagaggtctgggctgaacatcgaggacttggagaagctgcagatggcgaggccgaacatcctcgggctcaggaacaacatctactgcatggcccagctgctggacaactcagacacggctgagcccacgaaggctggccggggggcctctcagccgcccacccccacccctgcctcggatgcttttcagcgcaagctggagggctgcaggttcctgcatggctaccatcgcttcatgcactcagtggggcgggtcttcagcaagtggggggagagcccgaaccggagccggaga

SEQ ID NO: 5180 - DNA, 594 bp, Homo Sapiens
ggggacacccaaccacgtttcttggagcaggctaagtgtgagtgtcatttcctcaatgggacggagcgagtgtggaacctgatcagatacatctataaccaagaggagtacgcgcgctacaacagtgacctgggggagtaccaggcggtgacggagctggggcggcctgacgctgagtactggaacagccagaaggacctcctggagcggaggcgggccgaggtggacacctactgcagatacaactacggggttgtggagagcttcacagtgcagcggcgagtccaacctaaggtgactgtgtatccttcaaagacccagcccctgcagcaccacaacctcctggtctgctctgtgaatggtttctatccaggcagcattgaagtcaggtggttccggaacggccaggaagagaaggctggggtggtgtccacaggcctgatccagaatggagactggaccttccagaccctggtgatgctggaaacagttcctcggagtggagaggtttacacctgccaagtggagcatccaagcatgatgagccctctcacggtgcaatggagtgcacggtctgaatctgcacagagcaag

SEQ ID NO: 5181 - DNA, 240 bp, Homo Sapiens
cgcaacagcaaagaggagcgtattgacctggatgcggaagaggagaacatccaagaaggccctaaggagaccattgaaatagaaacacaagttcctgagaagaaaaaaggaatcttcaggagagcctatgacctattttgtgggctagagcagcacggtgcacccaagatgactgaggaagaggagaaagccatgaagatgaagatgacggacacctctgagaagcctttgtggaggaca

SEQ ID NO: 5182 - DNA, 1029 bp, Homo Sapiens
atccagttcaccgagtcctgctcaatggaccagagtgccaaggaacccctcatcaactacttggatatggaatacttcggcactatctccattggctccccaccacagaacttcactgtcatcttcgacactggctcctccaacctctgggtcccctctgtgtactgcactagcccagcctgcaagacgcacagcaggttccagccttcccagtccagcacatacagccagccaggtcaatctttctccattcagtatggaaccgggagcttgtccgggatcattggagccgaccaagtctctgtggaaggactaaccgtggttggccagcagtttggagaaagtgtcacagagccaggccagacctttgtggatgcagagtttgatggaattctgggcctgggatacccctccttggctgtgggaggagtgactccagtatttgacaacatgatggctcagaacctggtggacttgccgatgttttctgtctacatgagcagtaacccagaaggtggtgcggggagcgagctgatttttggaggctacgaccactcccatttctctgggagcctgaattgggtcccagtcaccaagcaagcttactggcagattgcactggataacatccaggtgggaggcactgttatgttctgctccgagggctgccaggccattgtggacacagggacttccctcatcactggcccttccgacaagattaagcagctgcaaaacgccattggggcagcccccgtggatggagaatatgctgtggagtgtgccaaccttaacgtcatgccggatgtcaccttcaccattaacggagtcccctataccctcagcccaactgcctacaccctactggacttcgtggatggaatgcagttctgcagcagtggctttcaaggacttgacatccaccctccagctgggcccctctggatcctgggggatgtcttcattcgacagttttactcagtctttgaccgtgggaataaccgtgtgggactggccccagcagtcccc

SEQ ID NO: 5183 - DNA, 642 bp, Homo Sapiens
accatgtgcagtgcccaggacaggactgatctcctcaatgtctgtatggatgccaagcaccacaagacaaagccaggtcctgaggacaagctgcatgaccaatgcagtccctggaagaagaatgcctgctgcacagccagcaccagccaggagctgcacaaggacacctcccgcctgtacaactttaactgggaccactgcggcaagatggagcccgcctgcaagcgccacttcatccaggacacctgtctctatgagtgctcacccaacctggggccctggatccagcaggtgaatcagagctggcgcaaagaacgcttcctggatgtgcccttatgcaaagaggactgtcagcgctggtgggaggattgtcacacctcccacacgtgcaagagcaactggcacagaggatgggactggacctcaggagttaacaagtgcccagctggggctctctgccgcacctttgagtcctacttccccactccagctgccctttgtgaaggcctctggagtcactcatacaaggtcagcaactacagccgagggagcggccgctgcatccagatgtggtttgattcagcccagggcaaccccaacgaggaagtggcgaggttctatgctgcagccatgcatgtgaat

SEQ ID NO: 5184 - DNA, 1218 bp, Homo Sapiens
ctggatttcaactaccaccgccaggaagggatggaagcgtttttgaagactgttgcccaaaactacagttctgtcactcacttacacagtattgggaaatctgtgaaaggtagaaacctgtgggttcttgttgtggggcggtttccaaaggaacacagaattgggattccagagttcaaatacgtggcaaatatgcatggagatgagactgttgggcgggagctgctgctccatctgattgactatctcgtaaccagtgatggcaaagaccctgaaatcacaaatctgatcaatagtacccggatacacatcatgccttccatgaacccagatggatttgaagccgtcaaaaagcctgactgttactacagcatcggaagggaaaattataaccagtatgacttgaatcgaaatttccccgatgcttttgaatataataatgtctcaaggcagcctgaaactgtggcagtcatgaagtggctgaaaacagagacgtttgtcctctctgcaaacctccatggtggtgccctcgtggccagttacccatttgataatggtgttcaagcaactggggcattatactcccgaagcttaacgcctgatgatgatgtttttcaatatcttgcacatacctatgcttcaagaaatcccaacatgaagaaaggagacgagtgtaaaaacaaaatgaactttcctaatggtgttacaaatggatactcttggtatccactccaaggtggaatgcaagattacaactacatctgggcccagtgttttgaaattacgttggagctgtcatgctgtaaatatcctcgtgaggagaagcttccatccttttggaataataacaaagcctcattaattgaatatataaagcaggtgcacctaggtgtaaagggtcaagtttttgatcagaatggaaatccattacccaatgtaattgtggaagtccaagacagaaaacatatctgcccctatagaaccaacaaatatggagagtattatctccttctcttgcctgggtcttatataataaatgttacagtccctggacatgatccacacatcacaaaggtgattattccggagaaatcccagaacttcagtgctcttaaaaaggatattctacttccattccaagggcaattggattctatcccagtatcaaatccttcatgcccaatgattcctctatacagaaatttgccagaccactca

SEQ ID NO: 5185 - DNA, 669 bp, Homo Sapiens
gaccatacccccaagtaccaggaccgactggccacaccgggcttgatgattcgccccaagactgagaaccttgatgtcattgtcaatgtcagtgacactgaaagctgggaccagcatgttcagaagctcaacaagttcttggagccttacaacgactctatccaagcccaaaagaatgatgtctgccgccctgggcgctattacgaacagccagataatggagtcctcaactaccccaaacgtgcctgccaattcaaccggacccagctgggcaactgctccggcattggggactccacccactatggttacagcactgggcagccctgtgtcttcatcaagatgaaccgggtcatcaacttctatgcaggagcaaaccagagcatgaatgttacctgtgctgggaagcgagatgaagatgctgagaatctcggcaacttcgtcatgttccccgccaacggcaacatcgacctcatgtacttcccctactatggcaaaaagttccacgtgaactacacacagcccctggtggctgtgaagttcctgaatgtgacccccaacgtggaggtgaatgtagaatgtcgcatcaacgccgccaacatcgccacagacgatgagcgagacaagttcgccggccgcgtggccttcaaactccgcatcaacaaaacc

SEQ ID NO: 5186 - DNA, 372 bp, Homo Sapiens
aatttggtgaatttccacagaatgatcaagttgacgacaggaaaggaagccgcactcagttatggcttctacggctgccactgtggcgtgggtggcagaggatcccccaaggatgcaacggatcgctgctgtgtcactcatgactgttgctacaaacgtctggagaaacgtggatgtggcaccaaatttctgagctacaagtttagcaactcggggagcagaatcacctgtgcaaaacaggactcctgcagaagtcaactgtgtgagtgtgataaggctgctgccacctgttttgctagaaacaagacgacctacaataaaaagtaccagtactattccaataaacactgcagagggagcacccctcgttgc

SEQ ID NO: 5187 - DNA, 2346 bp, Homo Sapiens
gacgatgaagttgatgtggatggtacagtagaagaggatctgggtaaaagtagagaaggatcaaggacggatgatgaagtagtacagagagaggaagaagctattcagttggatggattaaatgcatcacaaataagagaacttagagagaagtcggaaaagtttgccttccaagccgaagttaacagaatgatgaaacttatcatcaattcattgtataaaaataaagagattttcctgagagaactgatttcaaatgcttctgatgctttagataagataaggctaatatcactgactgatgaaaatgctctttctggaaatgaggaactaacagtcaaaattaagtgtgataaggagaagaacctgctgcatgtcacagacaccggtgtaggaatgaccagagaagagttggttaaaaaccttggtaccatagccaaatctgggacaagcgagtttttaaacaaaatgactgaagcacaggaagatggccagtcaacttctgaattgattggccagtttggtgtcggtttctattccgccttccttgtagcagataaggttattgtcacttcaaaacacaacaacgatacccagcacatctgggagtctgactccaatgaattttctgtaattgctgacccaagaggaaacactctaggacggggaacgacaattacccttgtcttaaaagaagaagcatctgattaccttgaattggatacaattaaaaatctcgtcaaaaaatattcacagttcataaactttcctatttatgtatggagcagcaagactgaaactgttgaggagcccatggaggaagaagaagcagccaaagaagagaaagaagaatctgatgatgaagctgcagtagaggaagaagaagaagaaaagaaaccaaagactaaaaaagttgaaaaaactgtctgggactgggaacttatgaatgatatcaaaccaatatggcagagaccatcaaaagaagtagaagaagatgaatacaaagctttctacaaatcattttcaaaggaaagtgatgaccccatggcttatattcactttactgctgaaggggaagttaccttcaaatcaattttatttgtacccacatctgctccacgtggtctgtttgacgaatatggatctaaaaagagcgattacattaagctctatgtgcgccgtgtattcatcacagacgacttccatgatatgatgcctaaatacctcaattttgtcaagggtgtggtggactcagatgatctccccttgaatgtttcccgcgagactcttcagcaacataaactgcttaaggtgattaggaagaagcttgttcgtaaaacgctggacatgatcaagaagattgctgatgataaatacaatgatactttttggaaagaatttggtaccaacatcaagcttggtgtgattgaagaccactcgaatcgaacacgtcttgctaaacttcttaggttccagtcttctcatcatccaactgacattactagcctagaccagtatgtggaaagaatgaaggaaaaacaagacaaaatctacttcatggctgggtccagcagaaaagaggctgaatcttctccatttgttgagcgacttctgaaaaagggctatgaagttatttacctcacagaacctgtggatgaatactgtattcaggcccttcccgaatttgatgggaagaggttccagaatgttgccaaggaaggagtgaagttcgatgaaagtgagaaaactaaggagagtcgtgaagcagttgagaaagaatttgagcctctgctgaattggatgaaagataaagcccttaaggacaagattgaaaaggctgtggtgtctcagcgcctgacagaatctccgtgtgctttggtggccagccagtacggatggtctggcaacatggagagaatcatgaaagcacaagcgtaccaaacgggcaaggacatctctacaaattactatgcgagtcagaagaaaacatttgaaattaatcccagacacccgctgatcagagacatgcttcgacgaattaaggaagatgaagatgataaaacagttttggatcttgctgtggttttgtttgaaacagcaacgcttcggtcagggtatcttttaccagacactaaagcatatggagatagaatagaaagaatgcttcgcctcagtttgaacattgaccctgatgcaaaggtggaagaagagcccgaagaagaacctgaagagacagcagaagacacaacagaagacacagagcaagacgaagatgaagaaatggatgtgggaacagatgaagaagaagaaacagcaaaggaatctacagctgaaaaagatgaattg

SEQ ID NO: 5188 - DNA, 2934 bp, Homo Sapiens
atgaataatccagccatcaagagaataggaaatcacattaccaagtctcctgaagacaagcgagaatatcgagggctagagctggccaatggtatcaaagtacttcttatcagtgatcccaccacggataagtcatcagcagcacttgatgtgcacataggttcattgtcggatcctccaaatattgctggcttaagtcatttttgtgaacatatgctttttttgggaacaaagaaataccctaaagaaaatgaatacagccagtttctcagtgagcatgcaggaagttcaaatgcctttactagtggagagcataccaattactattttgatgtttctcatgaacacctagaaggtgccctagacaggtttgcacagttttttctgtgccccttgttcgatgaaagttgcaaagacagagaggtgaatgcagttgattcagaacatgagaagaatgtgatgaatgatgcctggagactctttcaattggaaaaagctacagggaatcctaaacaccccttcagtaaatttgggacaggtaacaaatatactctggagactagaccaaaccaagaaggcattgatgtaagacaagagctactgaaattccattctgcttactattcatccaacttaatggctgtttgtgttttaggtcgagaatctttagatgacttgactaatctggtggtaaagttattttctgaagtagagaacaaaaatgttccattgccagaatttcctgaacaccctttccaagaagaacatcttaaacaactttacaaaatagtacccattaaagatattaggaatctctatgtgacatttcccatacctgaccttcagaaatactacaaatcaaatcctggtcattatcttggtcatctcattgggcatgaaggtcctggaagtctgttatcagaacttaagtcaaagggctgggttaatactcttgttggtgggcagaaggaaggagcccgaggttttatgttttttatcattaatgtggacttgaccgaggaaggattattacatgttgaagatataattttgcacatgtttcaatacattcagaagttacgtgcagaaggacctcaagaatgggttttccaagagtgcaaggacttgaatgctgttgcttttaggtttaaagacaaagagaggccacggggctatacatctaagattgcaggaatattgcattattatcccctagaagaggtgctcacagcggaatatttactggaagaatttagacctgacttaatagagatggttctcgataaactcagaccagaaaatgtccgggttgccatagtttctaaatcttttgaaggaaaaactgatcgcacagaagagtggtatggaacccagtacaaacaagaagctataccggatgaagtcatcaagaaatggcaaaatgctgacctgaatgggaaatttaaacttcctacaaagaatgaatttattcctacgaattttgagattttaccgttagaaaaagaggcgacaccataccctgctcttattaaggatacagctatgagcaaactttggttcaaacaagatgataagttttttttgccgaaggcttgtctcaactttgaatttttcagcccatttgcttatgtggaccccttgcactgtaacatggcctatttgtaccttgagctcctcaaagactcactcaacgagtatgcatatgcagcagagctagcaggcttgagctatgatctccaaaataccatctatgggatgtatctttcagtgaaaggttacaatgacaagcagccaattttactaaagaagattattgagaaaatggctacctttgagattgatgaaaaaagatttgaaattatcaaagaagcatatatgcgatctcttaacaatttccgggctgaacagcctcaccagcatgccatgtactacctccgcttgctgatgactgaagtggcctggactaaagatgagttaaaagaagctctggatgatgtaacccttcctcgccttaaggccttcatacctcagctcctgtcacggctgcacattgaagcccttctccatggaaacataacaaagcaggctgcattaggaattatgcagatggttgaagacaccctcattgaacatgctcataccaaacctctccttccaagtcagctggttcggtatagagaagttcagctccctgacagaggatggtttgtttatcagcagagaaatgaagttcacaataactgtggcatcgagatatactaccaaacagacatgcaaagcacctcagagaatatgtttctggagctcttctgtcagattatctcggaaccttgcttcaacaccctgcgcaccaaggagcagttgggctatatcgtcttcagcgggccacgtcgagctaatggcatacagggcttgagattcatcatccagtcagaaaagccacctcactacctagaaagcagagtggaagctttcttaattaccatggaaaagtccatagaggacatgacagaagaggccttccaaaaacacattcaggcattagcaattcgtcgactagacaaaccaaagaagctatctgctgagtgtgctaaatactggggagaaatcatctcccagcaatataattttgacagagataacactgaggttgcatatttaaagacacttaccaaggaagatatcatcaaattctacaaggaaatgttggcagtagatgctccaaggagacataaggtatccgtccatgttcttgccagggaaatggattcttgtcctgttgttggagagttcccatgtcaaaatgacataaatttgtcacaagcaccagccttgccacaacctgaagtgattcagaacatgaccgaattcaagcgtggtctgccactgtttccccttgtgaaaccacatattaacttcatggctgcaaaactc

SEQ ID NO: 5189 - DNA, 927 bp, Homo Sapiens
gcgcgctccaccgacacttttaactacgccacctaccacaccctggaggagatctatgacttcctggacctgctggtggcggagaacccgcaccttgtcagcaagatccagattggcaacacctatgaagggcgtcccatttacgtgctgaagttcagcacggggggcagtaagcgtccagccatctggatcgacacgggcatccattcccgggagtgggtcacccaggccagtggggtctggtttgcaaagaagatcactcaagactacgggcaggatgcagctttcaccgccattctcgacaccttggacatcttcctggagatcatcaccaaccctgatggctttgccttcacgcacagcacgaatcgcatgtggcgcaagactcggtcccacacagcaggctccctctgtattggcgtggaccccaacaggaactgggacgctggctttgggttgtccggagccagcagtaacccctgctcggagacttaccgcggcaagtttgccaattccgaagtggaggtcaagtccattgtagactttgtgaaggaccatgggaacatcaaggccttcatctccatccacagctactcccagctcctcatgtatccctatggctacaaaacagaaccagtccctgaccaggatgagctggatcagctttccaaggctgctgtgacagccctggcctctctctacgggaccaagttcaactatggcagcatcatcaaggcaatttatcaagccagtggaagcactattgactggacctacagccagggcatcaagtactccttcaccttcgagctccgggacactgggcgctatggcttcctgctgccagcctcccagatcatccccacagccaaggagacgtggctggcgcttctgaccatcatggagcacaccctgaatcacccctac

SEQ ID NO: 5190 - DNA, 921 bp, Homo Sapiens
gcaacaggacacagttatgagaagtacaacaagtgggaaacgatagaggcttggactcaacaagtcgccactgagaatccagccctcatctctcgcagtgttatcggaaccacatttgagggacgcgctatttacctcctgaaggttggcaaagctggacaaaataagcctgccattttcatggactgtggtttccatgccagagagtggatttctcctgcattctgccagtggtttgtaagagaggctgttcgtacctatggacgtgagatccaagtgacagagcttctcgacaagttagacttttatgtcctgcctgtgctcaatattgatggctacatctacacctggaccaagagccgattttggagaaagactcgctccacccatactggatctagctgcattggcacagaccccaacagaaattttgatgctggttggtgtgaaattggagcctctcgaaacccctgtgatgaaacttactgtggacctgccgcagagtctgaaaaggagaccaaggccctggctgatttcatccgcaacaaactctcttccatcaaggcatatctgacaatccactcgtactcccaaatgatgatctacccttactcatatgcttacaaactcggtgagaacaatgctgagttgaatgccctggctaaagctactgtgaaagaacttgcctcactgcacggcaccaagtacacatatggcccgggagctacaacaatctatcctgctgctgggggctctgacgactgggcttatgaccaaggaatcagatattccttcacctttgaacttcgagatacaggcagatatggctttctccttccagaatcccagatccgggctacctgcgaggagaccttcctggcaatcaagtatgttgccagctacgtcctggaacacctgtac

SEQ ID NO: 5191 - DNA, 924 bp, Homo Sapiens
atcccaggcaggcacagctacgcaaaatacaataattgggaaaagattgtggcttggactgaaaagatgatggataagtatcctgaaatggtctctcgtattaaaattggatctactgttgaagataatccactatatgttctgaagattggggaaaagaatgaaagaagaaaggctatttttatggattgtggcattcacgcacgagaatgggtctccccagcattctgccagtggtttgtctatcaggcaaccaaaacttatgggagaaacaaaattatgaccaaactcttggaccgaatgaatttttacattcttcctgtgttcaatgttgatggatatatttggtcatggacaaagaaccgcatgtggagaaaaaatcgttccaagaaccaaaactccaaatgcatcggcactgacctcaacaggaattttaatgcttcatggaactccattcctaacaccaatgacccatgtgcagataactatcggggctctgcaccagagtccgagaaagagacgaaagctgtcactaatttcattagaagccacctgaatgaaatcaaggtttacatcaccttccattcctactcccagatgctattgtttccctatggatatacatcaaaactgccacctaaccatgaggacttggccaaagttgcaaagattggcactgatgttctatcaactcgatatgaaacccgctacatctatggcccaatagaatcaacaatttacccgatatcaggttcttctttagactgggcttatgacctgggcatcaaacacacatttgcctttgagctccgagataaaggcaaatttggttttctccttccagaatcccggataaagccaacgtgcagagagaccatgctagctgtcaaatttattgccaagtatatcctcaagcatacttcc

SEQ ID NO: 5192 - DNA, 1314 bp, Homo Sapiens
gtgacctttcgccaccaccgctatgatgatcttgtgcggacgctgtacaaggtgcaaaacgaatgccccggcatcacgcgggtctacagcattgggcgcagcgtggaggggagacacctctacgtgctggagttcagcgaccaccctggaatccacgagcccttggaaccagaggtcaagtatgtggggaacatgcacggcaacgaagcgttgggccgcgagctgatgctgcagctgtcggagtttctgtgcgaggagttccggaacaggaaccagcgcatcgtccagctcatccaggacacgcgcattcacatcctgccatccatgaaccccgacggctacgaggtggctgctgcccagggcccaaacaagcctgggtatctagttggcaggaacaatgcaaatggagtggacctgaaccgcaacttccctgatctcaatacctatatctactataacgagaagtacggaggccccaaccaccacctgccccttccagacaactggaaaagtcaggtggaacccgagacccgggcggtgatccggtggatgcactccttcaactttgttctttcagccaatctccacggaggggcggtggtggccaattacccgtatgacaagtcctttgagcaccgggtccgaggggtccgccgcaccgccagcacccccacgcctgacgacaagctcttccagaagctggccaaggtctactcctatgcacatggatggatgttccaaggttggaactgcggagattacttcccagatggcatcaccaatggagcttcctggtattctctcagcaagggaatgcaagactttaattatctccataccaactgctttgagatcacgctggaactgagttgcgacaagtttccccccgaagaggagttacagcgggagtggctgggtaatcgggaagccctaatccagttcctggaacaggttcaccagggcatcaagggaatggtgcttgatgagaattacaataatctcgccaatgctgtcatttctgtcagtgggattaaccatgatgtcacttcaggtgaccatggtgattacttccggctgctgcttccaggtatctacactgttagtgccacagcacctgggtatgacccagagacagtaactgtgaccgtgggtcctgcggaaccaacgttggttaacttccacctcaaaagaagcatccctcaagtaagccctgtgaggagagctcccagcagaaggcacggagtcagagccaaagtgcagccccaagccagaaagaaagaaatggagatgaggcagctgcagagaggccctgcc

SEQ ID NO: 5193 - DNA, 1467 bp, Homo Sapiens
cgtccgcccaacatcgtgctgatctttgccgacgacctcggctatggggacctgggctgctatgggcaccccagctctaccactcccaacctggaccagctggcggcgggagggctgcggttcacagacttctacgtgcctgtgtctctgtgcacaccctctagggccgccctcctgaccggccggctcccggttcggatgggcatgtaccctggcgtcctggtgcccagctcccgggggggcctgcccctggaggaggtgaccgtggccgaagtcctggctgcccgaggctacctcacaggaatggccggcaagtggcaccttggggtggggcctgagggggccttcctgcccccccatcagggcttccatcgatttctaggcatcccgtactcccacgaccagggcccctgccagaacctgacctgcttcccgccggccactccttgcgacggtggctgtgaccagggcctggtccccatcccactgttggccaacctgtccgtggaggcgcagcccccctggctgcccggactagaggcccgctacatggctttcgcccatgacctcatggccgacgcccagcgccaggatcgccccttcttcctgtactatgcctctcaccacacccactaccctcagttcagtgggcagagctttgcagagcgttcaggccgcgggccatttggggactccctgatggagctggatgcagctgtggggaccctgatgacagccataggggacctggggctgcttgaagagacgctggtcatcttcactgcagacaatggacctgagaccatgcgtatgtcccgaggcggctgctccggtctcttgcggtgtggaaagggaacgacctacgagggcggtgtccgagagcctgccttggccttctggccaggtcatatcgctcccggcgtgacccacgagctggccagctccctggacctgctgcctaccctggcagccctggctggggccccactgcccaatgtcaccttggatggctttgacctcagccccctgctgctgggcacaggcaagagccctcggcagtctctcttcttctacccgtcctacccagacgaggtccgtggggtttttgctgtgcggactggaaagtacaaggctcacttcttcacccagggctctgcccacagtgataccactgcagaccctgcctgccacgcctccagctctctgactgctcatgagcccccgctgctctatgacctgtccaaggaccctggtgagaactacaacctgctggggggtgtggccggggccaccccagaggtgctgcaagccctgaaacagcttcagctgctcaaggcccagttagacgcagctgtgaccttcggccccagccaggtggcccggggcgaggaccccgccctgcagatctgctgtcatcctggctgcaccccccgcccagcttgctgccattgcccagatccccatgcc

SEQ ID NO: 5194 - DNA, 1158 bp, Homo Sapiens
aaggagttgaagtttgtgactttggtgtttcggcatggagaccgaagtcccattgacacctttcccactgaccccataaaggaatcctcatggccacaaggatttggccaactcacccagctgggcatggagcagcattatgaacttggagagtatataagaaagaggtatagaaaattcttgaatgagtcctataaacatgaacaggtttatattcgaagcacagacgttgaccggactttgatgagtgctatgacaaacctggcagccctgtttcccccagaaggtgtcagcatctggaatcctatcctactctggcagcccatcccggtgcacacagttcctctttctgaagatcagttgctatacctgcctttcaggaactgccctcgttttcaagaacttgagagtgagactttgaaatcagaggaattccagaagaggctgcacccttataaggattttatagctaccttgggaaaactttcaggattacatggccaggacctttttggaatttggagtaaagtctacgaccctttatattgtgagagtgttcacaatttcactttaccctcctgggccactgaggacaccatgactaagttgagagaattgtcagaattgtccctcctgtccctctatggaattcacaagcagaaagagaaatctaggctccaagggggtgtcctggtcaatgaaatcctcaatcacatgaagagagcaactcagataccaagctacaaaaaacttatcatgtattctgcgcatgacactactgtgagtggcctacagatggcgctagatgtttacaacggactccttcctccctatgcttcttgccacttgacggaattgtactttgagaagggggagtactttgtggagatgtactatcggaatgagacgcagcacgagccgtatcccctcatgctacctggctgcagccccagctgtcctctggagaggtttgctgagctggctggccctgtgatccctcaagactggtccacggagtgtatgaccacaaacagccatcaagttctaaaggtcatctttgctgttgccttttgcctgatatctgctgtcctaatggtactactgtttatccacattcgccgtggactctgctggcagagagaatcctatgggaacatc

SEQ ID NO: 5195 - DNA, 630 bp, Homo Sapiens
aggattgcatgggccaggactgagcttctcaatgtctgcatgaacgccaagcaccacaaggaaaagccaggccccgaggacaagttgcatgagcagtgtcgaccctggaggaagaatgcctgctgttctaccaacaccagccaggaagcccataaggatgtttcctacctatatagattcaactggaaccactgtggagagatggcacctgcctgcaaacggcatttcatccaggacacctgcctctacgagtgctcccccaacttggggccctggatccagcaggtggatcagagctggcgcaaagagcgggtactgaacgtgcccctgtgcaaagaggactgtgagcaatggtgggaagattgtcgcacctcctacacctgcaagagcaactggcacaagggctggaactggacttcagggtttaacaagtgcgcagtgggagctgcctgccaacctttccatttctacttccccacacccactgttctgtgcaatgaaatctggactcactcctacaaggtcagcaactacagccgagggagtggccgctgcatccagatgtggttcgacccagcccagggcaaccccaatgaggaggtggcgaggttctatgctgcagccatgagt

SEQ ID NO: 5196 - DNA, 1548 bp, Homo Sapiens
gtcttcggggtggctgcgggaacccggaggcccaacgtggtgctgctcctcacggacgaccaggacgaagtgctcggcggcatgacaccgctaaagaaaaccaaagctctcatcggagagatggggatgactttttccagtgcttatgtgccaagtgctctctgctgccccagcagagccagtatcctgacaggaaagtacccacataatcatcacgttgtgaacaacactctggaggggaactgcagtagtaagtcctggcagaagatccaagaaccaaatactttcccagcaattctcagatcaatgtgtggttatcagaccttttttgcagggaaatatttaaatgagtacggagccccagatgcaggtggactagaacacgttcctctgggttggagttactggtatgccttggaaaagaattctaagtattataattacaccctgtctatcaatgggaaggcacggaagcatggtgaaaactatagtgtggactacctgacagatgttttggctaatgtctccttggactttctggactacaagtccaactttgagcccttcttcatgatgatcgccactccagcgcctcattcgccttggacagctgcacctcagtaccagaaggctttccagaatgtctttgcaccaagaaacaagaacttcaacatccatggaacgaacaagcactggttaattaggcaagccaagactccaatgactaattcttcaatacagtttttagataatgcatttaggaaaaggtggcaaactctcctctcagttgatgaccttgtggagaaactggtcaagaggctggagttcactggggagctcaacaacacttacatcttctatacctcagacaatggctatcacacaggacagttttccttgccaatagacaagagacagctgtatgagtttgatatcaaagttccactgttggttcgaggacctgggatcaaaccaaatcagacaagcaagatgctggttgccaacattgacttgggtcctactattttggacattgctggctacgacctaaataagacacagatggatgggatgtccttattgcccattttgagaggtgccagtaacttgacctggcgatcagatgtcctggtggaataccaaggagaaggccgtaacgtcactgacccaacatgcccttccctgagtcctggcgtatctcaatgcttcccagactgtgtatgtgaagatgcttataacaatacctatgcctgtgtgaggacaatgtcagcattgtggaatttgcagtattgcgagtttgatgaccaggaggtgtttgtagaagtctataatctgactgcagacccagaccagatcactaacattgctaaaaccatagacccagagcttttaggaaagatgaactatcggttaatgatgttacagtcctgttctgggccaacctgtcgcactccaggggtttttgaccccggatacaggtttgacccccgtctcatgttcagcaatcgcggcagtgtcaggactcgaagattttccaaacatcttctg

SEQ ID NO: 5197 - DNA, 582 bp, Homo Sapiens
tgcagctgctccccggtgcacccgcaacaggcgttttgcaatgcagatgtagtgatcagggccaaagcggtcagtgagaaggaagtggactctggaaacgacatttatggcaaccctatcaagaggatccagtatgagatcaagcagataaagatgttcaaagggcctgagaaggatatagagtttatctacacggccccctcctcggcagtgtgtggggtctcgctggacgttggaggaaagaaggaatatctcattgcaggaaaggccgagggggacggcaagatgcacatcaccctctgtgacttcatcgtgccctgggacaccctgagcaccacccagaagaagagcctgaaccacaggtaccagatgggctgcgagtgcaagatcacgcgctgccccatgatcccgtgctacatctcctccccggacgagtgcctctggatggactgggtcacagagaagaacatcaacgggcaccaggccaagttcttcgcctgcatcaagagaagtgacggctcctgtgcgtggtaccgcggcgcggcgccccccaagcaggagtttctcgacatcgaggaccca

SEQ ID NO: 5198 - DNA, 702 bp, Homo Sapiens
agcacaacagcagtgcagacacccacctccggagagcctttggtctctactagcgagcccctgagctcaaagatgtacaccacttcaataacaagtgaccctaaggccgacagcactggggaccagacctcagccctacctccctcaacttccatcaatgagggatcccctctttggacttccattggtgccagcactggttcccctttacctgagccaacaacctaccaggaagtttccatcaagatgtcatcagtgccccaggaaacccctcatgcaaccagtcatcctgctgttcccataacagcaaactctctaggatcccacaccgtgacaggtggaaccataacaacgaactctccagaaacctccagtaggaccagtggagcccctgttaccacggcagctagctctctggagacctccagaggcacctctggaccccctcttaccatggcaactgtctctctggagacttccaaaggcacctctggaccccctgttaccatggcaactgactctctggagacctccactgggaccactggaccccctgttaccatgacaactggctctctggagccctccagcggggccagtggaccccaggtctctagcgtaaaactatctacaatgatgtctccaacgacctccaccaacgcaagcactgtgcccttccggaacccagatgagaactcacga

SEQ ID NO: 5199 - DNA, 1347 bp, Homo Sapiens
aaagaagtttgctacgaaagactcggctgcttcagtgatgactccccatggtcaggaattacggaaagacccctccatatattgccttggtctccaaaagatgtcaacacccgcttcctcctatatactaatgagaacccaaacaactttcaagaagttgccgcagattcatcaagcatcagtggctccaatttcaaaacaaatagaaaaactcgctttattattcatggattcatagacaagggagaagaaaactggctggccaatgtgtgcaagaatctgttcaaggtggaaagtgtgaactgtatctgtgtggactggaaaggtggctcccgaactggatacacacaagcctcgcagaacatcaggatcgtgggagcagaagtggcatattttgttgaatttcttcagtcggcgttcggttactcaccttccaacgtgcatgtcattggccacagcctgggtgcccacgctgctggggaggctggaaggagaaccaatgggaccattggacgcatcacagggttggacccagcagaaccttgctttcagggcacacctgaattagtccgattggaccccagcgatgccaaatttgtggatgtaattcacacggatggtgcccccatagtccccaatttggggtttggaatgagccaagtcgtgggccacctagatttctttccaaatggaggagtggaaatgcctggatgtaaaaagaacattctctctcagattgtggacatagacggaatctgggaagggactcgagactttgcggcctgtaatcacttaagaagctacaaatattacactgatagcatcgtcaaccctgatggctttgctggattcccctgtgcctcttacaacgtcttcactgcaaacaagtgtttcccttgtccaagtggaggctgcccacagatgggtcactatgctgatagatatcctgggaaaacaaatgatgtgggccagaaattttatctagacactggtgatgccagtaattttgcacgttggaggtataaggtatctgtcacactgtctggaaaaaaggttacaggacacatactagtttctttgttcggaaataaaggaaactctaagcagtatgaaattttcaagggcactctcaaaccagatagtactcattccaatgaatttgactcagatgtggatgttggggacttgcagatggttaaatttatttggtataacaatgtgatcaacccaactttacctagagtgggagcatccaagattatagtggagacaaatgttggaaaacagttcaacttctgtagtccagaaaccgtcagggaggaagttctgctcaccctcacaccgtgt

SEQ ID NO: 5200 - DNA, 1947 bp, Homo Sapiens
cagaggatgtttgaaattgactatagccgggactccttcctcaaggatggccagccatttcgctacatctcaggaagcattcactactcccgtgtgccccgcttctactggaaggaccggctgctgaagatgaagatggctgggctgaacgccatccagacgtatgtgccctggaactttcatgagccctggccaggacagtaccagttttctgaggaccatgatgtggaatattttcttcggctggctcatgagctgggactgctggttatcctgaggcccgggccctacatctgtgcagagtgggaaatgggaggattacctgcttggctgctagagaaagagtctattcttctccgctcctccgacccagattacctggcagctgtggacaagtggttgggagtccttctgcccaagatgaagcctctcctctatcagaatggagggccagttataacagtgcaggttgaaaatgaatatggcagctactttgcctgtgattttgactacctgcgcttcctgcagaagcgctttcgccaccatctgggggatgatgtggttctgtttaccactgatggagcacataaaacattcctgaaatgtggggccctgcagggcctctacaccacggtggactttggaacaggcagcaacatcacagatgctttcctaagccagaggaagtgtgagcccaaaggacccttgatcaattctgaattctatactggctggctagatcactggggccaacctcactccacaatcaagaccgaagcagtggcttcctccctctatgatatacttgcccgtggggcgagtgtgaacttgtacatgtttataggtgggaccaattttgcctattggaatggggccaactcaccctatgcagcacagcccaccagctacgactatgatgccccactgagtgaggctggggacctcactgagaagtattttgctctgcgaaacatcatccagaagtttgaaaaagtaccagaaggtcctatccctccatctacaccaaagtttgcatatggaaaggtcactttggaaaagttaaagacagtgggagcagctctggacattctgtgtccctctgggcccatcaaaagcctttatcccttgacatttatccaggtgaaacagcattatgggtttgtgctgtaccggacaacacttcctcaagattgcagcaacccagcacctctctcttcacccctcaatggagtccacgatcgagcatatgttgctgtggatgggatcccccagggagtccttgagcgaaacaatgtgatcactctgaacataacagggaaagctggagccactctggaccttctggtagagaacatgggacgtgtgaactatggtgcatatatcaacgattttaagggtttggtttctaacctgactctcagttccaatatcctcacggactggacgatctttccactggacactgaggatgcagtgcgcagccacctggggggctggggacaccgtgacagtggccaccatgatgaagcctgggcccacaactcatccaactacacgctcccggccttttatatggggaacttctccattcccagtgggatcccagacttgccccaggacacctttatccagtttcctggatggaccaagggccaggtctggattaatggctttaaccttggccgctattggccagcccggggccctcagttgaccttgtttgtgccccagcacatcctgatgacctcggccccaaacaccatcaccgtgctggaactggagtgggcaccctgcagcagtgatgatccagaactatgtgctgtgacgttcgtggacaggccagttattggctcatctgtgacctacgatcatccctccaaacctgttgaaaaaagactcatgcccccacccccgcaaaaaaacaaagattcatggctggaccatgta

SEQ ID NO: 5201 - DNA, 726 bp, Homo Sapiens
caggaagaatgtgtctgtgaaaactacaagctggccgtaaactgctttgtgaataataatcgtcaatgccagtgtacttcagttggtgcacaaaatactgtcatttgctcaaagctggctgccaaatgtttggtgatgaaggcagaaatgaatggctcaaaacttgggagaagagcaaaacctgaaggggccctccagaacaatgatgggctttatgatcctgactgcgatgagagcgggctctttaaggccaagcagtgcaacggcacctccatgtgctggtgtgtgaacactgctggggtcagaagaacagacaaggacactgaaataacctgctctgagcgagtgagaacctactggatcatcattgaactaaaacacaaagcaagagaaaaaccttatgatagtaaaagtttgcggactgcacttcagaaggagatcacaacgcgttatcaactggatccaaaatttatcacgagtattttgtatgagaataatgttatcactattgatctggttcaaaattcttctcaaaaaactcagaatgatgtggacatagctgatgtggcttattattttgaaaaagatgttaaaggtgaatccttgtttcattctaagaaaatggacctgacagtaaatggggaacaactggatctggatcctggtcaaactttaatttattatgttgatgaaaaagcacctgaattctcaatgcagggtctaaaa

SEQ ID NO: 5202 - DNA, 1107 bp, Homo Sapiens
gacttctttcgggacgaggcagagaggatcatgagggactcccctgtcattgatgggcacaatgacctcccctggcagctgctggatatgttcaacaaccggctgcaggacgagagggccaacctgaccaccttggccggcacacacaccaacatccccaagctgagggccggctttgtgggaggccagttctggtccgtgtacacgccctgcgacacccagaacaaagacgccgtgcggaggacgctggagcagatggacgtggtccaccgcatgtgccggatgtacccggagaccttcctgtatgtcaccagcagtgcaggcattcggcaggccttccgggaagggaaggtggccagcctgatcggcgtggagggcggccactccattgacagcagtttgggcgtcctgcgggcactctatcagctgggcatgcggtacctgaccctcacccacagctgcaacacgccctgggctgacaactggctggtggacacgggagacagcgagccccagagccaaggcttgtcaccctttgggcagcgtgtggtgaaggagctgaaccgtctgggggtcctcatcgacttggctcacgtgtctgtggccaccatgaaggccaccctgcagctgtccagagccccggtcatcttcagccactcctcggcctacagcgtgtgcgcaagccggcgcaacgtgcctgacgacgtcctgaggctggtgaaacagacagacagcctggtgatggtgaacttctacaacaattacatttcctgcaccaacaaggccaacctgtcccaagtggccgaccatctggatcacatcaaggaggtggcaggagccagagccgtgggttttggtggggactttgatggtgttccaagggtccctgaggggctggaggacgtctccaagtatccagacctgatcgctgagctgctcaggaggaactggacggaggcggaggtcaagggcgcactggctgacaacctgctgagggtcttcgaggctgtggaacaggccagcaacctcacacaggctcccgaggaggagcccatcccgctggaccagctgggtggctcctgcaggacccattacggctactcctct

SEQ ID NO: 5203 - DNA, 1587 bp, Homo Sapiens
ggttacagagacatcaatgagatcgacatcaacatgaacgatcctctttttacaaagcagtggtatctgatcaatactgggcaagctgatggcactcctggccttgatttgaatgtggctgaagcctgggagctgggatacacagggaaaggtgttaccattggaattatggatgatgggattgactatctccacccggacctggcctccaactataatgccgaagcaagttacgacttcagcagcaacgacccctatccttaccctcggtacacagatgactggtttaacagccacgggacccgatgtgcaggagaagtttctgctgccgccaacaacaatatctgtggagttggagtagcatacaactccaaggttgcaggcatccggatgctggaccagccattcatgacagacatcatcgaggcctcctccatcagtcatatgccacagctgattgacatctacagcgccagctggggccccacagacaacggcaagacagtggatgggccccgggagctcacgctgcaggccatggccgatggcgtgaacaagggccgcggcggcaaaggcagcatctacgtgtgggcctccggggacggcggcagctatgacgactgcaactgcgacggctacgcctccagcatgtggaccatctccatcaactcagccatcaacgacggcaggactgccctgtacgacgagagctgctcttccaccttggcttccaccttcagcaacgggaggaaaaggaaccccgaggccggtgtggcaaccacagatttgtacggcaactgcactctgaggcattctgggacatctgcagctgcccccgaggcagctggtgtgtttgcactggctctggaggctaacctgggtctgacctggcgggacatgcagcatctgactgtgctcacctccaaacggaaccagcttcacgacgaggtccatcagtggcggcgcaatggggtcggcctggaatttaatcacctctttggctacggggtccttgatgcaggtgccatggtgaaaatggctaaagactggaaaaccgtgcctgagagattccactgtgtgggaggctccgtgcaggaccctgagaaaataccatccactggcaagttggtgctgacactcacaaccgacgcctgtgaggggaaggaaaattttgtccgctacctggagcatgtccaggctgtcatcacggtcaacgcaaccagaagaggagacctgaacatcaacatgacttcccctatgggcaccaagtccattttgctgagccggcgtccaagggatgacgactccaaggtgggctttgacaagtggcctttcatgaccactcacacgtggggggaagacgcccgaggcacctggaccctggagctgggatttgtcggcagcgccccgcagaagggggtgctgaaggagtggaccctgatgctgcatggcactcagagtgccccgtacatcgaccaggtggtgcgggattaccagtccaagttggccatgtccaagaaagaggagctggaggaagagctggacgaagccgtggagagaagcctgaaaagcatccttaacaagaac

SEQ ID NO: 5204 - DNA, 666 bp, Homo Sapiens
aaggatcccgcttttactgctttgttaaccacccagttgcaagtgcaaagggagattgtaaataaacacaatgaactaaggaaagcagtctctccacctgccagtaacatgctaaagatggaatggagcagagaggtaacaacgaatgcccaaaggtgggcaaacaagtgcactttacaacatagtgatccagaggaccgcaaaaccagtacaagatgtggtgagaatctctatatgtcaagtgaccctacttcctggtcttctgcaatccaaagctggtatgacgagatcctagattttgtctatggtgtaggaccaaagagtcccaatgcagttgttggacattatactcagcttgtttggtactcgacttaccaggtaggctgtggaattgcctactgtcccaatcaagatagtctaaaatactactatgtttgccaatattgtcctgctggtaataatatgaatagaaagaataccccgtaccaacaaggaacaccttgtgccggttgccctgatgactgtgacaaaggactatgcaccaatagttgccagtatcaagatctcctaagtaactgtgattccttgaagaatacagctggctgtgaacatgagttactcaaggaaaagtgcaaggctacttgcctatgtgagaacaaaatttac

SEQ ID NO: 5205 - DNA, 1407 bp, Homo Sapiens
ggaaaggtgctggtgtgggcagcagaatacagccattggatgaatataaagacaatcctggatgagcttattcagagaggtcatgaggtgactgtactggcatcttcagcttccattctttttgatcccaacaactcatccgctcttaaaattgaaatttatcccacatctttaactaaaactgagttggagaatttcatcatgcaacagattaagagatggtcagaccttccaaaagatacattttggttatatttttcacaagtacaggaaatcatgtcaatatttggtgacataactagaaagttctgtaaagatgtagtttcaaataagaaatttatgaaaaaagtacaagagtcaagatttgacgtcatttttgcagatgctatttttccctgtagtgagctgctggctgagctatttaacataccctttgtgtacagtctcagcttctctcctggctacacttttgaaaagcatagtggaggatttattttccctccttcctacgtacctgttgttatgtcagaattaactgatcaaatgactttcatggagagggtaaaaaatatgatctatgtgctttactttgacttttggttcgaaatatttgacatgaagaagtgggatcagttttatagtgaagttctaggaagacccactacattatctgagacaatggggaaagctgacgtatggcttattcgaaactcctggaattttcagtttccatatccactcttaccaaatgttgattttgttggaggactccactgcaaacctgccaaacccctgcctaaggaaatggaagactttgtacagagctctggagaaaatggtgttgtggtgttttctctggggtcaatggtcagtaacatgacagaagaaagggccaacgtaattgcatcagccctggcccagatcccacaaaaggttctgtggagatttgatgggaataaaccagataccttaggtctcaatactcggctctacaagtggataccccagaatgaccttctaggtcatccaaagaccagagcttttataactcatggtggagccaatggcatctacgaggcaatctaccatgggatccctatggtggggattccattgtttgccgatcaacctgataacattgctcacatgaaggccaggggagcagctgttagagtggacttcaacacaatgtcgagtacagacttgctgaatgcattgaagagagtaattaatgatccttcatataaagagaatgttatgaaattatcaagaattcaacatgatcaaccagtgaagcccctggatcgagcagtcttctggattgaatttgtcatgcgccacaaaggagctaaacaccttcgggttgcagcccacgacctcacctggttccagtaccactctttggat

SEQ ID NO: 5206 - DNA, 1302 bp, Homo Sapiens
ctgcagcaagaggacggcatctccttcgagtaccaccgctaccccgagctgcgcgaggcgctcgtgtccgtgtggctgcagtgcaccgccatcagcaggatttacacggtggggcgcagcttcgagggccgggagctcctggtcatcgagctgtccgacaaccctggcgtccatgagcctggtgagcctgaatttaaatacattgggaatatgcatgggaatgaggctgttggacgagaactgctcattttcttggcccagtacctatgcaacgaataccagaaggggaacgagacaattgtcaacctgatccacagtacccgcattcacatcatgccttccctgaacccagatggctttgagaaggcagcgtctcagcctggtgaactcaaggactggtttgtgggtcgaagcaatgcccagggaatagatctgaaccggaactttccagacctggataggatagtgtacgtgaatgagaaagaaggtggtccaaataatcatctgttgaaaaatatgaagaaaattgtggatcaaaacacaaagcttgctcctgagaccaaggctgtcattcattggattatggatattccttttgtgctttctgccaatctccatggaggagaccttgtggccaattatccatatgatgagacgcggagtggtagtgctcatgaatacagctcctccccagatgacgccattttccaaagcttggcccgggcatactcttctttcaacccggccatgtctgaccccaatcggccaccatgtcgcaagaatgatgatgacagcagctttgtagatggaaccaccaacggtggtgcttggtacagcgtacctggagggatgcaagacttcaattaccttagcagcaactgttttgagatcaccgtggagcttagctgtgagaagttcccacctgaagagactctgaagacctactgggaggataacaaaaactccctcattagctaccttgagcagatacaccgaggagttaaaggatttgtccgagaccttcaaggtaacccaattgcgaatgccaccatctccgtggaaggaatagaccacgatgttacatccgcaaaggatggtgattactggagattgcttatacctggaaactataaacttacagcctcagctccaggctatctggcaataacaaagaaagtggcagttccttacagccctgctgctggggttgattttgaactggagtcattttctgaaaggaaagaagaggagaaggaagaattgatggaatggtggaaaatgatgtcagaaactttaaatttt

SEQ ID NO: 5207 - DNA, 1182 bp, Homo Sapiens
ctggacaatgggctcctgcagacaccacccatgggctggctggcctgggaacgcttccgctgcaacattaactgtgatgaggacccaaagaactgcataagtgaacagctcttcatggagatggctgaccggatggcacaggatggatggcgggacatgggctacacatacctcaacattgatgactgctggatcggtggtcgcgatgccagtggccgcctgatgccagatcccaagcgcttccctcatggcattcctttcctggctgactacgttcactccctgggcctgaagttgggtatctacgcggacatgggcaacttcacctgcatgggttacccaggcaccacactggacaaggtggtccaggatgctcagaccttcgccgagtggaaggtagacatgctcaagctggatggctgcttctccacccccgaggagcgggcccaggggtaccccaagatggctgctgccctgaatgccacaggccgccccatcgccttctcctgcagctggccagcctatgaaggcggcctccccccaagggtgaactacagtctgctggcggacatctgcaacctctggcgtaactatgatgacatccaggactcctggtggagcgtgctctccatcctgaattggttcgtggagcaccaggacatactgcagccagtggccggccctgggcactggaatgaccctgacatgctgctcattgggaactttggtctcagcttagagcaatcccgggcccagatggccctgtggacggtgctggcagcccccctcttgatgtccacagacctgcgtaccatctccgcccagaacatggacattctgcagaatccactcatgatcaaaatcaaccaggatcccttaggcatccagggacgcaggattcacaaggaaaaatctctcatcgaagtgtacatgcggcctctgtccaacaaggctagcgccttagtcttcttcagctgcaggaccgatatgccttatcgctaccactcctcccttggccagctgaacttcaccgggtctgtgatatatgaggcccaggacgtctactcaggtgacatcatcagtggcctccgagatgaaaccaacttcacagtgatcatcaacccttcaggggtagtgatgtggtacctgtatcccatcaagaacctggagatgtcccagcag

SEQ ID NO: 5208 - DNA, 1368 bp, Homo Sapiens
gtcaaccctggcgtcgtggtcaggatctcccagaagggcctggactacgccagccagcaggggacggccgctctgcagaaggagctgaagaggatcaagattcctgactactcagacagctttaagatcaagcatcttgggaaggggcattatagcttctacagcatggacatccgtgaattccagcttcccagttcccagataagcatggtgcccaatgtgggccttaagttctccatcagcaacgccaatatcaagatcagcgggaaatggaaggcacaaaagagattcttaaaaatgagcggcaattttgacctgagcatagaaggcatgtccatttcggctgatctgaagctgggcagtaaccccacgtcaggcaagcccaccatcacctgctccagctgcagcagccacatcaacagtgtccacgtgcacatctcaaagagcaaagtggggtggctgatccaactcttccacaaaaaaattgagtctgcgcttcgaaacaagatgaacagccaggtctgcgagaaagtgaccaattctgtatcctccaagctgcaaccttatttccagactctgccagtaatgaccaaaatagattctgtggctggaatcaactatggtctggtggcacctccagcaaccacggctgagaccctggatgtacagatgaagggggagttttacagtgagaaccaccacaatccacctccctttgctccaccagtgatggagtttcccgctgcccatgaccgcatggtatacctgggcctctcagactacttcttcaacacagccgggcttgtataccaagaggctggggtcttgaagatgacccttagagatgacatgattccaaaggagtccaaatttcgactgacaaccaagttctttggaaccttcctacctgaggtggccaagaagtttcccaacatgaagatacagatccatgtctcagcctccaccccgccacacctgtctgtgcagcccaccggccttaccttctaccctgccgtggatgtccaggcctttgccgtcctccccaactcctccctggcttccctcttcctgattggcatgcacacaactggttccatggaggtcagcgccgagtccaacaggcttgttggagagctcaagctggataggctgctcctggaactgaagcactcaaatattggccccttcccggttgaattgctgcaggatatcatgaactacattgtacccattcttgtgctgcccagggttaacgagaaactacagaaaggcttccctctcccgacgccggccagagtccagctctacaacgtagtgcttcagcctcaccagaacttcctgctgttcggtgcagacgttgtctataaa

SEQ ID NO: 5209 - DNA, 624 bp, Homo Sapiens
acggatacagaggagcggctggtggagcatctcctggatccttcccgctacaacaagcttatccgcccagccaccaatggctctgagctggtgacagtacagcttatggtgtcactggcccagctcatcagtgtgcatgagcgggagcagatcatgaccaccaatgtctggctgacccaggagtgggaagattatcgcctcacctggaagcctgaagagtttgacaacatgaagaaagttcggctcccttccaaacacatctggctcccagatgtggtcctgtacaacaatgctgacggcatgtacgaggtgtccttctattccaatgccgtggtctcctatgatggcagcatcttctggctgccgcctgccatctacaagagcgcatgcaagattgaagtaaagcacttcccatttgaccagcagaactgcaccatgaagttccgttcgtggacctacgaccgcacagagatcgacttggtgctgaagagtgaggtggccagcctggacgacttcacacctagtggtgagtgggacatcgtggcgctgccgggccggcgcaacgagaaccccgacgactctacgtacgtggacatcacgtatgacttcatcattcgccgcaag

SEQ ID NO: 5210 - DNA, 1683 bp, Homo Sapiens
gaaacagtccattgtgaccttcagcctgtgggccccgagagggacgaggtgacatataccactagccaggtctcgaagggctgcgtggctcaggcccccaatgccatccttgaagtccatgtcctcttcctggagttcccaacgggcccgtcacagctggagctgactctccaggcatccaagcaaaatggcacctggccccgagaggtgcttctggtcctcagtgtaaacagcagtgtcttcctgcatctccaggccctgggaatcccactgcacttggcctacaattccagcctggtcaccttccaagagcccccgggggtcaacaccacagagctgccatccttccccaagacccagatccttgagtgggcagctgagaggggccccatcacctctgctgctgagctgaatgacccccagagcatcctcctccgactgggccaagcccaggggtcactgtccttctgcatgctggaagccagccaggacatgggccgcacgctcgagtggcggccgcgtactccagccttggtccggggctgccacttggaaggcgtggccggccacaaggaggcgcacatcctgagggtcctgccgggccactcggccgggccccggacggtgacggtgaaggtggaactgagctgcgcacccggggatctcgatgccgtcctcatcctgcagggtcccccctacgtgtcctggctcatcgacgccaaccacaacatgcagatctggaccactggagaatactccttcaagatctttccagagaaaaacattcgtggcttcaagctcccagacacacctcaaggcctcctgggggaggcccggatgctcaatgccagcattgtggcatccttcgtggagctaccgctggccagcattgtctcacttcatgcctccagctgcggtggtaggctgcagacctcacccgcaccgatccagaccactcctcccaaggacacttgtagcccggagctgctcatgtccttgatccagacaaagtgtgccgacgacgccatgaccctggtactaaagaaagagcttgttgcgcatttgaagtgcaccatcacgggcctgaccttctgggaccccagctgtgaggcagaggacaggggtgacaagtttgtcttgcgcagtgcttactccagctgtggcatgcaggtgtcagcaagtatgatcagcaatgaggcggtggtcaatatcctgtcgagctcatcaccacagcggaaaaaggtgcactgcctcaacatggacagcctctctttccagctgggcctctacctcagcccacacttcctccaggcctccaacaccatcgagccggggcagcagagctttgtgcaggtcagagtgtccccatccgtctccgagttcctgctccagttagacagctgccacctggacttggggcctgagggaggcaccgtggaactcatccagggccgggcggccaagggcaactgtgtgagcctgctgtccccaagccccgagggtgacccgcgcttcagcttcctcctccacttctacacagtacccatacccaaaaccggcaccctcagctgcacggtagccctgcgtcccaagaccgggtctcaagaccaggaagtccataggactgtcttcatgcgcttgaacatcatcagccctgacctgtctggttgcacaagcaaaggc

SEQ ID NO: 5211 - DNA, 486 bp, Homo Sapiens
agtagcttttcctgggataactgtgatgaagggaaggaccctgcggtgatcagaagcctgactctggagcctgaccccatcgtcgttcctggaaatgtgaccctcagtgtcgtgggcagcaccagtgtccccctgagttctcctctgaaggtggatttagttttggagaaggaggtggctggcctctggatcaagatcccatgcacagactacattggcagctgtacctttgaacacttctgtgatgtgcttgacatgttaattcctactggggagccctgcccagagcccctgcgtacctatgggcttccttgccactgtcccttcaaagaaggaacctactcactgcccaagagcgaattcgttgtgcctgacctggagctgcccagttggctcaccaccgggaactaccgcatagagagcgtcctgagcagcagtgggaagcgtctgggctgcatcaagatcgctgcctctctaaagggcata

SEQ ID NO: 5212 - DNA, 747 bp, Homo Sapiens
gcagacaatttttcgctccatgatgcgttatctgggtctggaaacccaaaccctcaaggatggcctggcgcatgggggaaccagcctgctggggcagggggctacccaggggcttcctatcctggggcctaccccgggcaggcacccccaggggcttatcctggacaggcacctccaggcgcctaccctggagcacctggagcttatcccggagcacctgcacctggagtctacccagggccacccagcggccctggggcctacccatcttctggacagccaagtgccaccggagcctaccctgccactggcccctatggcgcccctgctgggccactgattgtgccttataacctgcctttgcctgggggagtggtgcctcgcatgctgataacaattctgggcacggtgaagcccaatgcaaacagaattgctttagatttccaaagagggaatgatgttgccttccactttaacccacgcttcaatgagaacaacaggagagtcattgtttgcaatacaaagctggataataactggggaagggaagaaagacagtcggttttcccatttgaaagtgggaaaccattcaaaatacaagtactggttgaacctgaccacttcaaggttgcagtgaatgatgctcacttgttgcagtacaatcatcgggttaaaaaactcaatgaaatcagcaaactgggaatttctggtgacatagacctcaccagtgcttcatataccatgata

SEQ ID NO: 5213 - DNA, 792 bp, Homo Sapiens
ggcgcgagctcggggggcttgggtcccgtggtgcgctgcgagccgtgcgacgcgcgtgcactggcccagtgcgcgcctccgcccgccgtgtgcgcggagctggtgcgcgagccgggctgcggctgctgcctgacgtgcgcactgagcgagggccagccgtgcggcatctacaccgagcgctgtggctccggccttcgctgccagccgtcgcccgacgaggcgcgaccgctgcaggcgctgctggacggccgcgggctctgcgtcaacgctagtgccgtcagccgcctgcgcgcctacctgctgccagcgccgccagctccaggaaatgctagtgagtcggaggaagaccgcagcgccggcagtgtggagagcccgtccgtctccagcacgcaccgggtgtctgatcccaagttccaccccctccattcaaagataatcatcatcaagaaagggcatgctaaagacagccagcgctacaaagttgactacgagtctcagagcacagatacccagaacttctcctccgagtccaagcgggagacagaatatggtccctgccgtagagaaatggaagacacactgaatcacctgaagttcctcaatgtgctgagtcccaggggtgtacacattcccaactgtgacaagaagggattttataagaaaaagcagtgtcgcccttccaaaggcaggaagcggggcttctgctggtgtgtggataagtatgggcagcctctcccaggctacaccaccaaggggaaggaggacgtgcactgctacagcatgcagagcaag

SEQ ID NO: 5214 - DNA, 870 bp, Homo Sapiens
gcggaggtgctgttccgctgcccgccctgcacacccgagcgcctggccgcctgcgggcccccgccggttgcgccgcccgccgcggtggccgcagtggccggaggcgcccgcatgccatgcgcggagctcgtccgggagccgggctgcggctgctgctcggtgtgcgcccggctggagggcgaggcgtgcggcgtctacaccccgcgctgcggccaggggctgcgctgctatccccacccgggctccgagctgcccctgcaggcgctggtcatgggcgagggcacttgtgagaagcgccgggacgccgagtatggcgccagcccggagcaggttgcagacaatggcgatgaccactcagaaggaggcctggtggagaaccacgtggacagcaccatgaacatgttgggcgggggaggcagtgctggccggaagcccctcaagtcgggtatgaaggagctggccgtgttccgggagaaggtcactgagcagcaccggcagatgggcaagggtggcaagcatcaccttggcctggaggagcccaagaagctgcgaccaccccctgccaggactccctgccaacaggaactggaccaggtcctggagcggatctccaccatgcgccttccggatgagcggggccctctggagcacctctactccctgcacatccccaactgtgacaagcatggcctgtacaacctcaaacagtgcaagatgtctctgaacgggcagcgtggggagtgctggtgtgtgaaccccaacaccgggaagctgatccagggagcccccaccatccggggggaccccgagtgtcatctcttctacaatgagcagcaggaggctcgcggggtgcacacccagcggatgcag

SEQ ID NO: 5215 - DNA, 369 bp, Homo Sapiens
aacaatgctaccacagttgcaccttctgtaggaattacaagattaattaactcatcaacggcagaaccagttaaagaagaggccaaaacttcaaatccaacttcttcactaacttctctttctgtggcaccaacattcagcccaaatataactctgggacccacctatttaaccactgtcaattcttcagactctgacaatgggaccacaagaacagcaagcaccaattctataggcattacaatttcaccaaatggaacgtggcttccagataaccagttcacggatgccagaacagaaccctgggaggggaattccagcaccgcagcaaccactccagaaactttccctccttcagatgagacacca

SEQ ID NO: 5216 - DNA, 660 bp, Homo Sapiens
cacagcaccaatgaacccagcaacatgtcatacgtgaaagagacagtggacagattgctcaaaggatatgacattcgcttgcggccggacttcggagggccccccgtcgacgttgggatgcggatcgatgtcgccagcatagacatggtctccgaagtgaatatggattatacactcaccatgtatttccagcagtcttggaaagacaaaaggctttcttattctggaatcccactgaacctcaccctagacaatagggtagctgaccaactctgtgtaccagacacctactttctgaatgacaagaaatcatttgtgcatggggtcacagtgaaaaatcgaatgattcgactgcatcctgatggaacagttctctatggactccgaatcacaaccacagctgcatgtatgatggatcttcgaagatatccactggatgagcagaactgcaccctggagatcgaaagttatggctataccactgatgacattgaattttactggaatggaggagaaggggcagtcactggtgttaataaaatcgaacttcctcaattttcaattgttgactacaagatggtgtctaagaaggtggagttcacaacaggagcgtatccacgactgtcactaagttttcgtctaaagagaaacattggttac

SEQ ID NO: 5217 - DNA, 702 bp, Homo Sapiens
cagaaatctgatgatgactatgaagattatgcttctaacaaaacatgggtcttgactccaaaagttcctgagggtgatgtcactgtcatcttaaacaacctgctggaaggatatgacaataaacttcggcctgatataggagtgaagccaacgttaattcacacagacatgtatgtgaatagcattggtccagtgaacgctatcaatatggaatacactattgatatattttttgcgcaaacgtggtatgacagacgtttgaaatttaacagcaccattaaagtcctccgattgaacagcaacatggtggggaaaatctggattccagacactttcttcagaaattccaaaaaagctgatgcacactggatcaccacccccaacaggatgctgagaatttggaatgatggtcgagtgctctacaccctaaggttgacaattgatgctgagtgccaattacaattgcacaattttccaatggatgaacactcctgccccttggagttctccagttatggctatccacgtgaagaaattgtttatcaatggaagcgaagttctgttgaagtgggcgacacaagatcctggaggctttatcaattctcatttgttggtctaagaaataccaccgaagtagtgaagacaacttccggagattatgtggtcatgtctgtctactttgatctgagcagaagaatggga

SEQ ID NO: 5218 - DNA, 144 bp, Homo Sapiens
gatgtcgcccacgggatccttaacgaggcctaccgcaaagtgctggaccagctgtccgccgggaagcacctgcagtcgctcgtggcccggggcgtgggtgggagcctcggcggcggcgcgggggacgacgcggagccgctctcc

SEQ ID NO: 5219 - DNA, 1389 bp, Homo Sapiens
gacaagctgctggtggtccctcaggacggaagccactggcttagtatgaaggatatagttgaggttctcagtgaccggggtcatgagattgtagtggtggtgcctgaagttaatttgcttttgaaagaatccaaatactacacaagaaaaatctatccagtgccgtatgaccaagaagagctgaagaaccgttaccaatcatttggaaacaatcactttgctgagcgatcattcctaactgctcctcagacagagtacaggaataacatgattgttattggcctgtacttcatcaactgccagagcctcctgcaggacagggacaccctgaacttctttaaggagagcaagtttgatgctcttttcacagacccagccttaccctgtggggtgatcctggctgagtatttgggcctaccatctgtgtacctcttcaggggttttccgtgttccctggagcatacattcagcagaagcccagaccctgtgtcctacattcccaggtgctacacaaagttttcagaccacatgactttttcccaacgagtggccaacttccttgttaatttgttggagccctatctattttattgtctgttttcaaagtatgaagaactcgcatcagctgtcctcaagagagatgtggatataatcaccttatatcagaaggtctctgtttggctgttaagatatgactttgtgcttgaatatcctaggccggtcatgcccaacatggtcttcattggaggtatcaactgtaagaagaggaaagacttgtctcaggaatttgaagcctacattaatgcttctggagaacatggaattgtggttttctctttgggatcaatggtctcagaaattccagagaagaaagctatggcaactgctgatgctttgggcaaaatccctcagacagtcctgtggcggtacactggaacccgaccatcgaatcttgcgaacaacacgatacttgttaagtggctaccccaaaacgatctgcttggtcacccgatgacccgtgcctttatcacccatgctggttcccatggtgtttatgaaagcatatgcaatggcgttcccatggtgatgatgcccttgtttggtgatcagatggacaatgcaaagcgcatggagactaagggagctggagtgaccctgaatgttctggaaatgacttctgaagatttagaaaatgctctaaaagcagtcatcaatgacaaaagttacaaggagaacatcatgcgcctctccagccttcacaaggaccgcccggtggagccgctggacctggccgtgttctgggtggagtttgtgatgaggcacaagggcgcgccacacctgcgccccgcagcccacgacctcacctggtaccagtaccattccttggac

SEQ ID NO: 5220 - DNA, 1629 bp, Homo Sapiens
ccctcagcctccaaggaacctgacaaccatgtgtacaccagggctgccgtggccgcggatgccaagcagtgctcgaagattgggagggatgcactgcgggacggtggctctgcggtggatgcagccattgcagccctgttgtgtgtggggctcatgaatgcccacagcatgggcatcgggggtggcctcttcctcaccatctacaacagcaccacacgaaaagctgaggtcatcaacgcccgcgaggtggcccccaggctggcctttgccaccatgttcaacagctcggagcagtcccagaagggggggctgtcggtggcggtgcctggggagatccgaggctatgagctggcacaccagcggcatgggcggctgccctgggctcgcctcttccagcccagcatccagctggcccgccagggcttccccgtgggcaagggcttggcggcagccctggaaaacaagcggaccgtcatcgagcagcagcctgtcttgtgtgaggtgttctgccgggatagaaaggtgcttcgggagggggagagactgaccctgccgcagctggctgacacctacgagacgctggccatcgagggtgcccaggccttctacaacggcagcctcacggcccagattgtgaaggacatccaggcggccgggggcattgtgacagctgaggacctgaacaactaccgtgctgagctgatcgagcacccgctgaacatcagcctgggagacgtggtgctgtacatgcccagtgcgccgctcagcgggcccgtgctggccctcatcctcaacatcctcaaagggtacaacttctcccgggagagcgtggagagccccgagcagaagggcctgacgtaccaccgcatcgtagaggctttccggtttgcctacgccaagaggaccctgcttggggaccccaagtttgtggatgtgactgaggtggtccgcaacatgacctccgagttcttcgctgcccagctccgggcccagatctctgacgacaccactcacccgatctcctactacaagcccgagttctacacgccggatgacgggggcactgctcacctgtctgtcgtcgcagaggacggcagtgctgtgtccgccaccagcaccatcaacctctactttggctccaaggtccgctccccggtcagcgggatcctgttcaataatgaaatggacgacttcagctctcccagcatcaccaacgagtttggggtacccccctcacctgccaatttcatccagccagggaagcagccgctctcgtccatgtgcccgacgatcatggtgggccaggacggccaggtccggatggtggtgggagctgctgggggcacacagatcaccacggccactgcactggccatcatctacaacctctggttcggctatgacgtgaagcgggccgtggaggagccccggctgcacaaccagcttctgcccaacgtcacgacagtggagagaaacattgaccaggcagtgactgcagccctggagacccggcaccatcacacccagatcgcgtccaccttcatcgctgtggtgcaagccatcgtccgcacggctggtggctgggcagctgcctcggactccaggaaaggcggggagcctgccggctac

SEQ ID NO: 5221 - DNA, 549 bp, Homo Sapiens
cagatcccattgtgtgccaacctagtaccggtgcccatcaccaacgccaccctggaccggatcactggcaagtggttttatatcgcatcggcctttcgaaacgaggagtacaataagtcggttcaggagatccaagcaaccttcttttactttacccccaacaagacagaggacacgatctttctcagagagtaccagacccgccagaaccagtgcttctataactccagttacctgaatgtccagcgggagaatgggaccgtctccagatacgagggaggccgagaacatgttgctcacctgctgttccttagggacaccaagaccttgatgtttggttcctacctggacgatgagaagaactgggggctgtctttctatgctgacaagccagagacgaccaaggagcaactgggagagttctacgaagctctcgactgcttgtgcattcccaggtcagatgtcatgtacaccgactggaaaaaggataagtgtgagccactggagaagcagcacgagaaggagaggaaacaggaggagggggaatcc

SEQ ID NO: 5222 - DNA, 945 bp, Homo Sapiens
gggaactgctggctccgtcaagcgaagaacggccgctgccaggtcctgtacaagaccgaactgagcaaggaggagtgctgcagcaccggccggctgagcacctcgtggaccgaggaggacgtgaatgacaacacactcttcaagtggatgattttcaacgggggcgcccccaactgcatcccctgtaaagaaacgtgtgagaacgtggactgtggacctgggaaaaaatgccgaatgaacaagaagaacaaaccccgctgcgtctgcgccccggattgttccaacatcacctggaagggtccagtctgcgggctggatgggaaaacctaccgcaatgaatgtgcactcctaaaggcaagatgtaaagagcagccagaactggaagtccagtaccaaggcagatgtaaaaagacttgtcgggatgttttctgtccaggcagctccacatgtgtggtggaccagaccaataatgcctactgtgtgacctgtaatcggatttgcccagagcctgcttcctctgagcaatatctctgtgggaatgatggagtcacctactccagtgcctgccacctgagaaaggctacctgcctgctgggcagatctattggattagcctatgagggaaagtgtatcaaagcaaagtcctgtgaagatatccagtgcactggtgggaaaaaatgtttatgggatttcaaggttgggagaggccggtgttccctctgtgatgagctgtgccctgacagtaagtcggatgagcctgtctgtgccagtgacaatgccacttatgccagcgagtgtgccatgaaggaagctgcctgctcctcaggtgtgctactggaagtaaagcactccggatcttgcaactccatttcggaagacaccgaggaagaggaggaagatgaagaccaggactacagctttcctatatcttctattctagagtgg

SEQ ID NO: 5223 - DNA, 171 bp, Homo Sapiens
gcgcaagagccagtcaaaggtccagtctccactaagcctggctcctgccccattatcttgatccggtgcgccatgttgaatccccctaaccgctgcttgaaagatactgactgcccaggaatcaagaagtgctgtgaaggctcttgcgggatggcctgtttcgttccccag

SEQ ID NO: 5224 - DNA, 3030 bp, Homo Sapiens
atttcttgtggctctcctccgcctatcctaaatggccggattagttattattctacccccattgctgttggtaccgtgataaggtacagttgttcaggtaccttccgcctcattggagaaaaaagtctattatgcataactaaagacaaagtggatggaacctgggataaacctgctcctaaatgtgaatatttcaataaatattcttcttgccctgagcccatagtaccaggaggatacaaaattagaggctctacaccctacagacatggtgattctgtgacatttgcctgtaaaaccaacttctccatgaacggaaacaagtctgtttggtgtcaagcaaataatatgtgggggccgacacgactaccaacctgtgtaagtgttttccctctcgagtgtccagcacttcctatgatccacaatggacatcacacaagtgagaatgttggctccattgctccaggattgtctgtgacttacagctgtgaatctggttacttgcttgttggagaaaagatcattaactgtttgtcttcgggaaaatggagtgctgtcccccccacatgtgaagaggcacgctgtaaatctctaggacgatttcccaatgggaaggtaaaggagcctccaattctccgggttggtgtaactgcaaactttttctgtgatgaagggtatcgactgcaaggcccaccttctagtcggtgtgtaattgctggacagggagttgcttggaccaaaatgccagtatgtgaagaaattttttgcccatcacctccccctattctcaatggaagacatataggcaactcactagcaaatgtctcatatggaagcatagtcacttacacttgtgacccggacccagaggaaggagtgaacttcatccttattggagagagcactctccgttgtacagttgatagtcagaagactgggacctggagtggccctgccccacgctgtgaactttctacttctgcggttcagtgtccacatccccagatcctaagaggccgaatggtatctgggcagaaagatcgatatacctataacgacactgtgatatttgcttgcatgtttggcttcaccttgaagggcagcaagcaaatccgatgcaatgcccaaggcacatgggagccatctgcaccagtctgtgaaaaggaatgccaggcccctcctaacatcctcaatgggcaaaaggaagatagacacatggtccgctttgaccctggaacatctataaaatatagctgtaaccctggctatgtgctggtgggagaagaatccatacagtgtacctctgagggggtgtggacaccccctgtaccccaatgcaaagtggcagcgtgtgaagctacaggaaggcaactcttgacaaaaccccagcaccaatttgttagaccagatgtcaactcttcttgtggtgaagggtacaagttaagtgggagtgtttatcaggagtgtcaaggcacaattccttggtttatggagattcgtctttgtaaagaaatcacctgcccaccaccccctgttatctacaatggggcacacaccgggagttccttagaagattttccatatggaaccacggtcacttacacatgtaaccctgggccagaaagaggagtggaattcagcctcattggagagagcaccatccgttgtacaagcaatgatcaagaaagaggcacctggagtggccctgctcccctgtgtaaactttccctccttgctgtccagtgctcacatgtccatattgcaaatggatacaagatatctggcaaggaagccccatatttctacaatgacactgtgacattcaagtgttatagtggatttactttgaagggcagtagtcagattcgttgcaaagctgataacacctgggatcctgaaataccagtttgtgaaaaaggctgccagtcacctcctgggctccaccatggtcgtcatacaggtggaaatacggtcttctttgtctctgggatgactgtagactacacttgtgaccctggctatttgcttgtgggaaacaaatccattcactgtatgccttcaggaaattggagtccttctgccccacggtgtgaagaaacatgccagcatgtgagacagagtcttcaagaacttccagctggttcacgtgtggagctagttaatacgtcctgccaagatgggtaccagttgactggacatgcttatcagatgtgtcaagatgctgaaaatggaatttggttcaaaaagattccactttgtaaagttattcactgtcaccctccaccagtgattgtcaatgggaagcacacaggcatgatggcagaaaactttctatatggaaatgaagtctcttatgaatgtgaccaaggattctatctcctgggagagaaaaaattgcagtgcagaagtgattctaaaggacatggatcttggagcgggccttccccacagtgcttacgatctcctcctgtgactcgctgccctaatccagaagtcaaacatgggtacaagctcaataaaacacattctgcatattcccacaatgacatagtgtatgttgactgcaatcctggcttcatcatgaatggtagtcgcgtgattaggtgtcatactgataacacatgggtgccaggtgtgccaacttgtatcaaaaaagccttcatagggtgtccacctccgcctaagacccctaacgggaaccatactggtggaaacatagctcgattttctcctggaatgtcaatcctgtacagctgtgaccaaggctacctgctggtgggagaggcactccttctttgcacacatgagggaacctggagccaacctgcccctcattgtaaagaggtaaactgtagctcaccagcagatatggatggaatccagaaagggctggaaccaaggaaaatgtatcagtatggagctgttgtaactctggagtgtgaagatgggtatatgctggaaggcagtccccagagccagtgccaatcggatcaccaatggaaccctcccctggcggtttgcagatcccgt

SEQ ID NO: 5225 - DNA, 1230 bp, Homo Sapiens
gagatttgtgaggtaagtgaagaaaactacatccgcctaaaacctctgttgaatacaatgatccagtcaaactataacaggggaaccagcgctgtcaatgttgtgttgtccctcaaacttgttggaatccagatccaaaccctgatgcaaaagatgatccaacaaatcaaatacaatgtgaaaagcagattgtcagatgtaagctcgggagagcttgccttgattatactggctttgggagtatgtcgtaacgctgaggaaaacttaatatatgattaccacctgatcgacaagctagaaaataaattccaagcagaaattgaaaatatggaagcacacaatggcactcccctgactaactactaccagctcagcctggacgttttggccttgtgtctgttcaatgggaactactcaaccgccgaagttgtcaaccacttcactcctgaaaataaaaactattattttggtagccagttctcagtagatactggtgcaatggctgtcctggctctgacctgtgtgaagaagagtctaataaatgggcagatcaaagcagatgaaggcagtttaaagaacatcagtatttatacaaagtcactggtagaaaagattctgtctgagaaaaaagaaaatggtctcattggaaacacatttagcacaggagaagccatgcaggccctctttgtatcatcagactattataatgaaaatgactggaattgccaacaaactctgaatacagtgctcacggaaatttctcaaggagcattcagcaatccaaacgctgcagcccaggtcttacctgccctgatgggaaagaccttcttggatattaacaaagactcttcttgcgtctctgcttcaggtaacttcaacatctccgctgatgagcctataactgtgacacctcctgactcacaatcatatatctccgtcaattactctgtgagaatcaatgaaacatatttcaccaatgtcactgtgctaaatggttctgtcttcctcagtgtgatggagaaagcccagaaaatgaatgatactatatttggtttcacaatggaggagcgctcatgggggccctatatcacctgtattcagggcctatgtgccaacaataatgacagaacctactgggaacttctgagtggaggcgaaccactgagccaaggagctggtagttacgttgtccgcaatggagaaaacttggaggttcgctggagcaaatac

SEQ ID NO: 5226 - DNA, 1227 bp, Homo Sapiens
gagatgtgtgaaataccagagatggacagccatctggtagagaagttgggccagcacctcttaccttggatggaccggctttccctggagcacttgaaccccagcatctatgtgggcctacgcctctccagtctgcaggctgggaccaaggaagacctctacctgcacagcctcaagcttggttaccagcagtgcctcctagggtctgccttcagcgaggatgacggtgactgccagggcaagccttccatgggccagctggccctctacctgctcgctctcagagccaactgtgagtttgtcaggggccacaagggggacaggctggtctcacagctcaaatggttcctggaggatgagaagagagccattgggcatgatcacaagggccacccccacactagctactaccagtatggcctgggcattctggccctgtgtctccaccagaagcgggtccatgacagcgtggtggacaaacttctgtatgctgtggaacctttccaccagggccaccattctgtggacacagcagccatggcaggcttggcattcacctgtctgaagcgctcaaacttcaaccctggtcggagacaacggatcaccatggccatcagaacagtgcaagaggagatcttgaaggcccagacccccgagggccactttgggaatgtctacagcaccccattggcattacagttcctcatgacttcccccatgcgtggggcagaactgggaacagcatgtctcaaggcgagggttgctttgctggccagtctgcaggatggagccttccagaatgctctcatgatttcccagctgctgcccgttctgaaccacaagacctacattgatctgatcttcccagactgtctggcaccacgagtcatgttggaaccagctgctgagaccattcctcagacccaagagatcatcagtgtcacgctgcaggtgcttagtctcttgccgccgtacagacagtccatctctgttctggccgggtccaccgtggaagatgtcctgaagaaggcccatgagttaggaggattcacatatgaaacacaggcctccttgtcaggcccctacttaacctccgtgatggggaaagcggccggagaaagggagttctggcagcttctccgagaccccaacaccccactgttgcaaggtattgctgactacagacccaaggatggagaaaccattgagctgaggctggttagctgg

SEQ ID NO: 5227 - DNA, 711 bp, Homo Sapiens
attgtgggaggctgggagtgtgagaagcattcccaaccctggcaggtggctgtgtacagtcatggatgggcacactgtgggggtgtcctggtgcacccccagtgggtgctcacagctgcccattgcctaaagaagaatagccaggtctggctgggtcggcacaacctgtttgagcctgaagacacaggccagagggtccctgtcagccacagcttcccacacccgctctacaatatgagccttctgaagcatcaaagccttagaccagatgaagactccagccatgacctcatgctgcttcgcctgtcagagcctgccaagatcacagatgttgtgaaggtcctgggcctgcccacccaggagccagcactggggaccacctgctacgcctcaggctggggcagcatcgaaccagaggagttcttgcgccccaggagtcttcagtgtgtgagcctccatctcctgtccaatgacatgtgtgctagagcttactctgagaaggtgacagagttcatgttgtgtgctgggctctggacaggtggtaaagacacttgtgggggtgattctgggggtccacttgtctgtaatggtgtgcttcaaggtatcacatcatggggccctgagccatgtgccctgcctgaaaagcctgctgtgtacaccaaggtggtgcattaccggaagtggatcaaggacaccatcgcagccaacccc

SEQ ID NO: 5228 - DNA, 666 bp, Homo Sapiens
atcgttggcggccggaaggcgaggccccgccagttcccgttcctggcctccattcagaatcaaggcaggcacttctgcgggggtgccctgatccatgcccgcttcgtgatgaccgcggccagctgcttccaaagccagaaccccggggttagcaccgtggtgctgggtgcctatgacctgaggcggcgggagaggcagtcccgccagacgttttccatcagcagcatgagcgagaatggctacgacccccagcagaacctgaacgacctgatgctgcttcagctggaccgtgaggccaacctcaccagcagcgtgacgatactgccactgcctctgcagaacgccacggtggaagccggcaccagatgccaggtggccggctgggggagccagcgcagtggggggcgtctctcccgttttcccaggtttgtcaacgtgactgtgacccccgaggaccagtgtcgccccaacaacgtgtgcaccggtgtgctcacccgccgcggtggcatctgcaatggggacgggggcacccccctcgtctgcgagggcctggcccacggcgtggcctccttttccctggggccctgtggccgaggccctgacttcttcacccgagtggcgctcttccgagactggatcgatggtgttctcaacaacccgggaccg

SEQ ID NO: 5229 - DNA, 735 bp, Homo Sapiens
atcgtcgggggtcaggaggcccccaggagcaagtggccctggcaggtgagcctgagagtccgcgaccgatactggatgcacttctgtgggggctccctcatccacccccagtgggtgctgaccgcggcgcactgcctgggaccggacgtcaaggatctggccaccctcagggtgcaactgcgggagcagcacctctactaccaggaccagctgctgccggtcagcaggatcatcgtgcacccacagttctacatcatccagactggagcggatatcgccctgctggagctggaggagcccgtgaacatctccagccgcgtccacacggtcatgctgccccctgcctcggagaccttccccccggggatgccgtgctgggtcactggctggggcgatgtggacaatgatgagcccctcccaccgccatttcccctgaagcaggtgaaggtccccataatggaaaaccacatttgtgacgcaaaataccaccttggcgcctacacgggagacgacgtccgcatcatccgtgacgacatgctgtgtgccgggaacacccggagggactcatgccagggcgactctggagggcccctggtgtgcaaggtgaatggcacctggctacaggcgggcgtggtcagctgggacgagggctgtgcccagcccaaccggcctggcatctacacccgtgtcacctactacttggactggatccaccactatgtccccaaaaagccg

SEQ ID NO: 5230 - DNA, 432 bp, Homo Sapiens
attttactttcagcatccaagtccataagaaatttagatgatgacatggtatttaatacattcaggttggggaaaggctttcagaaggaagacactgcagaaaaatcagttattgctccttccctggaacaatataaaaatgatgagagcagtttcatgaacgaagaggaaaataaagtttcaaagaacacaggctccaaacataatttcttaaatcatggtctgccactgaatctggctataaaaccttatcttgcactaaaaggatctgtagctttcccagctgagaatggagttcagaatactgaatcaacacaagaaaagagagaaattggggatgaagaaaactcagctaaatttcctataggaaggagagattttgacatgctcagatgtatgctgggaagagtctaccgaccttgttggcaagtc

SEQ ID NO: 5231 - DNA, 654 bp, Homo Sapiens
cagccagaggcggcccagcaggaggcagtgacggccgcggagcatccgggcctggatgacttcctgcgccaggtggagcgcctcctcttcctccgggaaaacatccagcggctgcaaggggaccagggtgagcactccgcgtcccagatctttcaatctgactggctctccaaacgtcagcatccaggcaaaagagaggaggaggaggaagagggagttgaagaagaggaagaggaagaagggggggctgtgggaccccacaaacggcagcaccctggccgacgagaagatgaggcttcatggtcagtcgatgtaacccagcacaagcggcagcatcctggccggcgctccccctggcttgcatatgctgtcccgaagcggcagcacccaggcagaaggctggcagatcccaaggctcaaaggagctgggaagaagaggaggaggaggaagagagagaggaagacctgatgcctgaaaaacgccagcatccgggcaagagggccctgggaggcccctgtgggccccagggagcctatggtcaagcgggcctcctgctggggctcctggatgacctgagtaggagccagggagctgaggaaaagcggcagcaccctggtcggcgggcagcctgggtcagggagcccctggaggag

SEQ ID NO: 5232 - DNA, 678 bp, Homo Sapiens
atcatcgggggccatgaggccaagccccactcccgcccctacatggcctttgttcagtttctgcaagagaagagtcggaagaggtgtggcggcatcctagtgagaaaggactttgtgctgacagctgctcactgccagggaagctccataaatgtcaccttgggggcccacaatatcaaggaacaggagcggacccagcagtttatccctgtgaaaagacccatcccccatccagcctataatcctaagaacttctccaacgacatcatgctactgcagctggagagaaaggccaagtggaccacagctgtgcggcctctcaggctacctagcagcaaggcccaggtgaagccagggcagctgtgcagtgtggctggctggggttatgtctcaatgagcactttagcaaccacactgcaggaagtgttgctgacagtgcagaaggactgccagtgtgaacgtctcttccatggcaattacagcagagccactgagatttgtgtgggggatccaaagaagacacagaccggtttcaagggggactccggggggcccctcgtgtgtaaggacgtagcccaaggtattctctcctatggaaacaaaaaagggacacctccaggagtctacatcaaggtctcacacttcctgccctggataaagagaacaatgaagcgcctc

SEQ ID NO: 5233 - DNA, 702 bp, Homo Sapiens
tcagatgagcactgtccagagcttcctccagtggacaatagcatatttgtcgcaaaggaggtggaaggacagattctggggacttacgtttgtatcaagggctaccacctggtaggaaagaagacccttttttgcaatgcctctaaggagtgggataacaccactactgagtgccgcttgggccactgtcctgatcctgtgctggtgaatggagagttcagttcttcagggcctgtgaatgtaagtgacaaaatcacgtttatgtgcaatgaccactacatcctcaagggcagcaatcggagccagtgtctagaggaccacacctgggcacctccctttcccatctgcaaaagtagggactgtgaccctcctgggaatccagttcatggctattttgaaggaaataacttcaccttaggatccaccattagttattactgtgaagacaggtactacttagtgggcgtgcaggagcagcaatgcgttgatggggagtggagcagtgcacttccagtctgcaagttgatccaggaagctcccaaaccagagtgtgagaaggcacttcttgcctttcaggagagtaagaacctctgcgaagccatggagaactttatgcaacaattaaaggaaagtggcatgacaatggaggagctaaaatattctctggagctgaagaaagctgagttgaaggcaaaattgttg

SEQ ID NO: 5234 - DNA, 969 bp, Homo Sapiens
tccagccctctgcccctggtcgtcaacacttggccctttaagaatgcaaccgaagcagcgtggagggcattagcatctggaggctctgccctggatgcagtggagagcggctgtgccatgtgtgagagagagcagtgtgacggctctgtaggctttggaggaagtcctgatgaacttggagaaaccacactagatgccatgatcatggatggcactactatggatgtaggagcagtaggagatctcagacgaattaaaaatgctattggtgtggcacggaaagtactggaacatacaacacacacacttttagtaggagagtcagccaccacatttgctcaaagtatggggtttatcaatgaagacttatctaccagtgcttctcaagctcttcattcagattggcttgctcggaattgccagccaaattattggaggaacgttataccagatccctcaaaatactgcggaccctacaaaccacctggtatcttaaagcaggatattcctatccataaagaaacagaagatgatcgtggtcatgacactattggcatggttgtaatccataagacaggacatattgctgctggtacatctacaaatggtataaaattcaaaatacatggccgtgtaggagactcaccaatacctggagctggagcctatgctgacgatactgcaggggcagccgcagccactgggaatggtgatatattgatgcgcttcctgccaagctaccaagctgtagaatacatgagaagaggagaagatccaaccatagcttgccaaaaagtgatttcaagaatccagaagcattttccagaattctttggggctgttatatgtgccaatgtgactggaagttacggtgctgcttgcaataaactttcaacatttactcagtttagtttcatggtttataattccgaaaaaaatcagccaactgaggaaaaagtggactgcatc

SEQ ID NO: 5235 - DNA, 408 bp, Homo Sapiens
gggaagaaagagaaaccagaaaaaaaagtgaagaagtctgactgtggagaatggcagtggagtgtgtgtgtgcccaccagtggagactgtgggctgggcacacgggagggcactcggactggagctgagtgcaagcaaaccatgaagacccagagatgtaagatcccctgcaactggaagaagcaatttggcgcggagtgcaaataccagttccaggcctggggagaatgtgacctgaacacagccctgaagaccagaactggaagtctgaagcgagccctgcacaatgccgaatgccagaagactgtcaccatctccaagccctgtggcaaactgaccaagcccaaacctcaagcagaatctaagaagaagaaaaaggaaggcaagaaacaggagaagatgctggat

SEQ ID NO: 5236 - DNA, 369 bp, Homo Sapiens
gtcgccaaaaagaaagataaggtgaagaagggcggcccggggagcgagtgcgctgagtgggcctgggggccctgcacccccagcagcaaggattgcggcgtgggtttccgcgagggcacctgcggggcccagacccagcgcatccggtgcagggtgccctgcaactggaagaaggagtttggagccgactgcaagtacaagtttgagaactggggtgcgtgtgatgggggcacaggcaccaaagtccgccaaggcaccctgaagaaggcgcgctacaatgctcagtgccaggagaccatccgcgtcaccaagccctgcacccccaagaccaaagcaaaggccaaagccaagaaagggaagggaaaggac

SEQ ID NO: 5237 - DNA, 903 bp, Homo Sapiens
ttctcaatgaaaaatttgcatcgaagagtcaaaatagaggattctgaagaaaatggggtctttaagtacaggccacgatattatctttacaagcatgcctacttttatcctcatttaaaacgatttccagttcagggcagtagtgactcatccgaagaaaatggagatgacagttcagaagaggaggaggaagaagaggagacttcaaatgaaggagaaaacaatgaagaatcgaatgaagatgaagactctgaggctgagaataccacactttctgctacaacactgggctatggagaggacgccacgcctggcacagggtatacagggttagctgcaatccagcttcccaagaaggctggggatataacaaataaagctacaaaagagaaggaaagtgatgaagaagaagaggaggaagaggaaggaaatgaaaacgaagaaagcgaagcagaagtggatgaaaacgaacaaggcataaacggcaccagtaccaacagcacagaggcagaaaacggcaacggcagcagcggaggagacaatggagaagaaggggaagaagaaagtgtcactggagccaatgcagaagacaccacagagaccggaaggcagggcaagggcacctcgaagacaacaacctctccaaatggtgggtttgaacctacaaccccaccacaagtctatagaaccacttccccaccttttgggaaaaccaccaccgttgaatacgagggggagtacgaatacacgggcgccaatgaatacgacaatggatatgaaatctatgaaagtgagaacggggaacctcgtggggacaattaccgagcctatgaagatgagtacagctactttaaaggacaaggctacgatggctatgatggtcagaattactaccaccaccag

SEQ ID NO: 5238 - DNA, 735 bp, Homo Sapiens
aggcactggggctggggcctgtgccttatcggctggaacgagttcatcctgcagcccatccacaacctgctcatgggtgacaccaaggagcagcgcatcctgaaccacgtgctgcagcatgcggagcccgggaacgcacagagcgtgctggaggccattgacacctactgcgagcagaaggagtgggccatgaacgtgggcgacaagaaaggcaagatcgtggacgccgtgattcaggagcaccagccctccgtgctgctggagctgggggcctactgtggctactcagctgtgcgcatggcccgcctgctgtcaccaggggcgaggctgatcaccatcgagatcaaccccgactgtgccgccatcacccagcggatggtggatttcgctggcgtgaaggacaaggtcacccttgtggttggagcgtcccaggacatcatcccccagctgaagaagaagtatgatgtggacacactggacatggtcttcctcgaccactggaaggaccggtacctgccggacacgcttctcttggaggaatgtggcctgctgcggaaggggacagtgctactggctgacaacgtgatctgcccaggtgcgccagacttcctagcacacgtgcgcgggagcagctgctttgagtgcacacactaccaatcgttcctggaatacagggaggtggtggacggcctggagaaggccatctacaagggcccaggcagcgaagcagggccc

SEQ ID NO: 5239 - DNA, 1395 bp, Homo Sapiens
catgctgggaagatactgttgatcccagtggatggcagccactggctgagcatgcttggggccatccagcagctgcagcagaggggacatgaaatagttgtcctagcacctgacgcctcgttgtacatcagagacggagcattttacaccttgaagacgtaccctgtgccattccaaagggaggatgtgaaagagtcttttgttagtctcgggcataatgtttttgagaatgattctttcctgcagcgtgtgatcaaaacatacaagaaaataaaaaaggactctgctatgcttttgtctggctgttcccacttactgcacaacaaggagctcatggcctccctggcagaaagcagctttgatgtcatgctgacggaccctttccttccttgcagccccatcgtggcccagtacctgtctctgcccactgtattcttcttgcatgcactgccatgcagcctggaatttgaggctacccagtgccccaacccattctcctacgtgcccaggcctctctcctctcattcagatcacatgaccttcctgcagcgggtgaagaacatgctcattgccttttcacagaactttctgtgcgacgtggtttattccccgtatgcaacccttgcctcagaattccttcagagagaggtgactgtccaggacctattgagctctgcatctgtctggctgtttagaagtgactttgtgaaggattaccctaggcccatcatgcccaatatggtttttgttggtggaatcaactgccttcaccaaaatccactatcccaggaatttgaagcctacattaatgcttctggagaacatggaattgtggttttctctttgggatcaatggtctcagaaattccagagaagaaagctatggcaattgctgatgctttgggcaaaatccctcagacagtcctgtggcggtacactggaacccgaccatcgaatcttgcgaacaacacgatacttgttaagtggctaccccaaaacgatctgcttggtcacccgatgacccgtgcctttatcacccatgctggttcccatggtgtttatgaaagcatatgcaatggcgttcccatggtgatgatgcccttgtttggtgatcagatggacaatgcaaagcgcatggagactaagggagctggagtgaccctgaatgttctggaaatgacttctgaagatttagaaaatgctctaaaagcagtcatcaatgacaaaagttacaaggagaacatcatgcgcctctccagccttcacaaggaccgcccggtggagccgctggacctggccgtgttctgggtggagtttgtgatgaggcacaagggcgcgccacacctgcgccccgcagcccacgacctcacctggtaccagtaccattccttggac

SEQ ID NO: 5240 - DNA, 1389 bp, Homo Sapiens
ggaaaggtgttggtggtgcccactgatggcagcccctggctcagcatgcgggaggccttgcgggagctccatgccagaggccaccaggcggtggtcctcaccccagaggtgaatatgcacatcaaagaagagaaatttttcaccctgacagcctatgctgttccatggacccagaaggaatttgatcgcgttacgctgggctacactcaagggttctttgaaacagaacatcttctgaagagatattctagaagtatggcaattatgaacaatgtatctttggcccttcataggtgttgtgtggagctactgcataatgaggccctgatcaggcacctgaatgctacttcctttgatgtggttttaacagaccccgttaacctctgcggggcggtgctggctaagtacctgtcgattcctgctgtgtttttttggaggtacattccatgtgacttagactttaagggcacacagtgtccaaatccttcctcctatattcctaagttactaacgaccaattcagaccacatgacattcctgcaaagggtcaagaacatgctctaccctctggccctgtcctacatttgccatactttttctgccccttatgcaagtcttgcctctgagctttttcagagagaggtgtcagtggtggatcttgtcagctatgcatccgtgtggctgttccgaggggactttgtgatggactaccccaggccgatcatgcccaacatggtcttcattgggggcatcaactgtgccaacgggaagccactatctcaggaatttgaagcctacattaatgcttctggagaacatggaattgtggttttctctttgggatcaatggtctcagaaattccagagaagaaagctatggcaattgctgatgctttgggcaaaatccctcagacagtcctgtggcggtacactggaacccgaccatcgaatcttgcgaacaacacgatacttgttaagtggctaccccaaaacgatctgcttggtcacccgatgacccgtgcctttatcacccatgctggttcccatggtgtttatgaaagcatatgcaatggcgttcccatggtgatgatgcccttgtttggtgatcagatggacaatgcaaagcgcatggagactaagggagctggagtgaccctgaatgttctggaaatgacttctgaagatttagaaaatgctctaaaagcagtcatcaatgacaaaagttacaaggagaacatcatgcgcctctccagccttcacaaggaccgcccggtggagccgctggacctggccgtgttctgggtggagtttgtgatgaggcacaagggcgcgccacacctgcgccccgcagcccacgacctcacctggtaccagtaccattccttggac

SEQ ID NO: 5241 - DNA, 711 bp, Homo Sapiens
gacgaagccatccactgcccgccctgctccgaggagaagctggcgcgctgccgcccccccgtgggctgcgaggagctggtgcgagagccgggctgcggctgttgcgccacttgcgccctgggcttggggatgccctgcggggtgtacaccccccgttgcggctcgggcctgcgctgctacccgccccgaggggtggagaagcccctgcacacactgatgcacgggcaaggcgtgtgcatggagctggcggagatcgaggccatccaggaaagcctgcagccctctgacaaggacgagggtgaccaccccaacaacagcttcagcccctgtagcgcccatgaccgcaggtgcctgcagaagcacttcgccaaaattcgagaccggagcaccagtgggggcaagatgaaggtcaatggggcgccccgggaggatgcccggcctgtgccccagggctcctgccagagcgagctgcaccgggcgctggagcggctggccgcttcacagagccgcacccacgaggacctctacatcatccccatccccaactgcgaccgcaacggcaacttccaccccaagcagtgtcacccagctctggatgggcagcgtggcaagtgctggtgtgtggaccggaagacgggggtgaagcttccggggggcctggagccaaagggggagctggactgccaccagctggctgacagctttcgagag

SEQ ID NO: 5242 - DNA, 798 bp, Homo Sapiens
gcagagtcacactggtgctacgaggttcaagccgagtcctccaactacccctgcttggtgccagtcaagtggggtggaaactgccagaaggaccgccagtcccccatcaacatcgtcaccaccaaggcaaaggtggacaaaaaactgggacgcttcttcttctctggctacgataagaagcaaacgtggactgtccaaaataacgggcactcagtgatgatgttgctggagaacaaggccagcatttctggaggaggactgcctgccccataccaggccaaacagttgcacctgcactggtccgacttgccatataagggctcggagcacagcctcgatggggagcactttgccatggagatgcacatagtacatgagaaagagaaggggacatcgaggaatgtgaaagaggcccaggaccctgaagacgaaattgcggtgctggcctttctggtggaggctggaacccaggtgaacgagggcttccagccactggtggaggcactgtctaatatccccaaacctgagatgagcactacgatggcagagagcagcctgttggacctgctccccaaggaggagaaactgaggcactacttccgctacctgggctcactcaccacaccgacctgcgatgagaaggtcgtctggactgtgttccgggagcccattcagcttcacagagaacagatcctggcattctctcagaagctgtactacgacaaggaacagacagtgagcatgaaggacaatgtcaggcccctgcagcagctggggcagcgcacggtgataaagtcc

SEQ ID NO: 5243 - DNA, 1101 bp, Homo Sapiens
ttaaccccaggaaaccccaagtgggaacgcactaacttgacctacaggattcgaaactataccccacagctgtcagaggctgaggtagaaagagctatcaaggatgcctttgaactctggagtgttgcatcacctctcatcttcaccaggatctcacagggagaggcagatatcaacattgctttttaccaaagagatcacggtgacaattctccatttgatggacccaatggaatccttgctcatgcctttcagccaggccaaggtattggaggagatgctcattttgatgccgaagaaacatggaccaacacctccgcaaattacaacttgtttcttgttgctgctcatgaatttggccattctttggggctcgctcactcctctgaccctggtgccttgatgtatcccaactatgctttcagggaaaccagcaactactcactccctcaagatgacatcgatggcattcaggccatctatggactttcaagcaaccctatccaacctactggaccaagcacacccaaaccctgtgaccccagtttgacatttgatgctatcaccacactccgtggagaaatacttttctttaaagacaggtacttctggagaaggcatcctcagctacaaagagtcgaaatgaattttatttctctattctggccatcccttccaactggtatacaggctgcttatgaagattttgacagagacctcattttcctatttaaaggcaaccaatactgggctctgagtggctatgatattctgcaaggttatcccaaggatatatcaaactatggcttccccagcagcgtccaagcaattgacgcagctgttttctacagaagtaaaacatacttctttgtaaatgaccaattctggagatatgataaccaaagacaattcatggagccaggttatcccaaaagcatatcaggtgcctttccaggaatagagagtaaagttgatgcagttttccagcaagaacatttcttccatgtcttcagtggaccaagatattacgcatttgatcttattgctcagagagttaccagagttgcaagaggcaataaatggcttaactgtagatatggc

SEQ ID NO: 5244 - DNA, 1647 bp, Homo Sapiens
gggcatccgtcctcgccacctgtggtggacaccgtgcatggcaaagtgctggggaagttcgtcagcttagaaggatttgcacagcctgtggccattttcctgggaatcccttttgccaagccgcctcttggacccctgaggtttactccaccgcagcctgcagaaccatggagctttgtgaagaatgccacctcgtaccctcctatgtgcacccaagatcccaaggcggggcagttactctcagagctatttacaaaccgaaaggagaacattcctctcaagctttctgaagactgtctttacctcaatatttacactcctgctgacttgaccaagaaaaacaggctgccggtgatggtgtggatccacggaggggggctgatggtgggtgcggcatcaacctatgatgggctggcccttgctgcccatgaaaacgtggtggtggtgaccattcaatatcgcctgggcatctggggattcttcagcacaggggatgaacacagccgggggaactggggtcacctggaccaggtggctgccctgcgctgggtccaggacaacattgccagctttggagggaacccaggctctgtgaccatctttggagagtcagcgggaggagaaagtgtctctgttcttgttttgtctccattggccaagaatctcttccaccgggccatttctgagagtggcgtggccctcacttctgttctggtgaagaaaggtgatgtcaagcccttggctgagcaaattgctatcactgctgggtgcaaaaccaccacctctgctgtcatggttcactgcctgcgacagaagacggaagaggagctcttggagacgacattgaaaatgaaattcttatctctggacttacagggagaccccagagagagtcaaccccttctgggcactgtgattgatgggatgctgctgctgaaaacacctgaagagcttcaagctgaaaggaatttccacactgtcccctacatggtcggaattaacaagcaggagtttggctggttgattccaatgttgatgagctatccactctccgaagggcaactggaccagaagacagccatgtcactcctgtggaagtcctatccccttgtttgcattgctaaggaactgattccagaagccactgagaaatacttaggaggaacagacgacactgtcaaaaagaaagacctgttcctggacttgatagcagatgtgatgtttggtgtcccatctgtgattgtggcccggaaccacagagatgctggagcacccacctacatgtatgagtttcagtaccgtccaagcttctcatcagacatgaaacccaagacggtgataggagaccacggggatgagctcttctccgtctttggggccccatttttaaaagagggtgcctcagaagaggagatcagacttagcaagatggtgatgaaattctgggccaactttgctcgcaatggaaaccccaatggggaagggctgccccactggccagagtacaaccagaaggaagggtatctgcagattggtgccaacacccaggcggcccagaagctgaaggacaaagaagtagctttctggaccaacctctttgccaagaaggcagtggagaagccaccccagacagaacacatagagctg

SEQ ID NO: 5245 - DNA, 1995 bp, Homo Sapiens
aacttccagaactgtggccctcgcccctgtgagacatctgtgtgtttggatctccgggatcattacctggcctctgggaacacaagtgtggccccctgcaccgacttcttcagctttgcctgtggaagggccaaagagaccaataattcttttcaggagcttgccacaaagaacaaaaaccgacttcggagaatactggaggtccagaattcctggcacccaggctctggggaggagaaagccttccagttctacaactcctgcatggatacacttgccattgaagctgcagggactggtcccctcagacaagttattgaggagcttggaggctggcgcatctctggtaaatggacttccttaaactttaaccgaacgctgagacttctgatgagtcagtatggccatttccctttcttcagagcctacctaggacctcatcctgcctctccacacacaccagtcatccagatagaccagccagagtttgatgttcccctcaagcaagatcaagaacagaagatctatgcccagatctttcgggaatacctgacttacctgaatcagctgggaaccttgctgggaggagacccaagcaaggtgcaagaacactcttccttgtcaatctccatcacttcacggctgttccagtttctgaggcccctggagcagcggcgggcacagggcaagctcttccagatggtcactatcgaccagctcaaggaaatggcccccgccatcgactggttgtcctgcttgcaagcgacattcacaccgatgtccctgagcccttctcagtccctcgtggtccatgacgtggaatatttgaaaaacatgtcacaactggtggaggagatgctgctaaagcagagggactttctgcagagccacatgatcttagggctggtggtgaccctttctccagccctggacagtcaattccaggaggcacgcagaaagctcagccagaaactgcgggaactgacagagcaaccacccatgcctgcccgcccacgatggatgaagtgcgtggaggagacaggcacgttcttcgagcccacgctggcggctttgtttgttcgtgaggcctttggcccgagcacccgaagtgctgccatgaaattattcactgcgatccgggatgccctcatcactcgcctcagaaaccttccctggatgaatgaggagacccagaacatggcccaggacaaggttgctcaactgcaggtggagatgggggcttcagaatgggccctgaagccagagctggcccgacaagaatacaacgatatacagcttggatcgagcttcctgcagtctgtcctgagctgtgtccggtccctccgagctagaattgtccagagcttcttgcagcctcacccccaacacaggtggaaggtgtccccttgggacgtcaatgcttactattcggtatctgaccatgtggtagtctttccagctggactcctccaacccccattcttccaccctggctatcccagagccgtgaactttggcgctgctggcagcatcatggcccacgagctgttgcacatcttctaccagctcttactgcctgggggctgcctcgcctgtgacaaccatgccctccaggaagctcacctgtgcctgaagcgccattatgctgcctttccattacctagcagaacctccttcaatgactccctcacattcttagagaatgctgcagacgttggggggctagccatcgcgctgcaggcatacagcaagaggctgttacggcaccatggggagactgtcctgcccagcctggacctcagcccccagcagatcttctttcgaagctatgcccaggtgatgtgtaggaagcccagcccccaggactctcacgacactcacagccctccacacctccgagtccacgggcccctcagcagcaccccagcctttgccaggtatttccgctgtgcacgtggtgctctcttgaacccctccagccgctgccagctctgg

SEQ ID NO: 5246 - DNA, 549 bp, Homo Sapiens
gatgagaagaagaaggggcccaaagtcaccgtcaaggtgtattttgacctacgaattggagatgaagatgtaggccgggtgatctttggtctcttcggaaagactgttccaaaaacagtggataattttgtggccttagctacaggagagaaaggatttggctacaaaaacagcaaattccatcgtgtaatcaaggacttcatgatccagggcggagacttcaccaggggagatggcacaggaggaaagagcatctacggtgagcgcttccccgatgagaacttcaaactgaagcactacgggcctggctgggtgagcatggccaacgcaggcaaagacaccaacggctcccagttcttcatcacgacagtcaagacagcctggctagatggcaagcatgtggtgtttggcaaagttctagagggcatggaggtggtgcggaaggtggagagcaccaagacagacagccgggataaacccctgaaggatgtgatcatcgcagactgcggcaagatcgaggtggagaagccctttgccatcgccaaggag

SEQ ID NO: 5247 - DNA, 2013 bp, Homo Sapiens
cagctcagaggggatgggctaggcttcagaaaccggaacaacagcactggagtcgccgggctctccgaggaggcatcagcagagcttcgccaccacctccacagccctagagaccatccagatgagaacaaggatgtttccacagagaatgggcatcatttctggagccacccagaccgtgaaaaggaggatgaagatgtctccaaggaatatgggcacctactcccaggccacaggtcccaagaccacaaagtcggagatgagggtgtctcaggtgaggaggtctttgcagagcatggtgggcaggcccgtgggcacagaggccacgggagtgaagacacggaagactcagctgagcacaggcaccacctccccagccacaggagccacagccatcaagacgaggatgaggatgaagttgtgtccagtgagcatcaccatcatatcctcaggcatggacaccgaggccatgatggggaagatgatgaaggagaagaggaggaggaggaggaggaggaggaagaggaggcctccactgagtatggacaccaggcccacaggcaccgaggccatgggagtgaagaggatgaggatgtctcagatggacaccatcatcatggccccagccacaggcaccaaggccatgaagaagatgacgatgatgatgatgatgatgatgatgatgatgatgatgatgatgtctccattgaatatagacaccaggctcacaggcaccaaggccacgggattgaagaggatgaagatgtctcagatggacaccatcatcgcgaccccagccacaggcaccgaagccatgaagaagatgacaatgatgatgatgatgtctccactgagtatggacaccaggcccacaggcaccaagaccacagaaaggaagaggttgaggctgtctcaggtgaacaccaccatcatgtccctgaccacaggcaccaaggccacagagacgaggaagaagatgaggatgtgtccactgaacgttggcaccagggtccccaacatgtccaccatggccttgtagatgaggaagaggaagaagaggagatcacagtccagttcggccactatgttgcaagccaccaacctcgaggccacaagagtgatgaagaggacttccaagatgagtataaaacagaagtccctcaccatcaccaccacagagtccccagggaggaagatgaggaggtctctgctgagcttggccaccaggcccccagccacaggcaaagccaccaagatgaagaaactggccatggtcaaagagggtccatcaaagagatgagccatcaccccccaggacacacagtggtcaaggatagaagccatttgaggaaggatgattctgaggaggaaaaggagaaggaagaggaccccggctcccatgaggaagacgatgaaagttcagagcagggagagaaaggcacccatcatggcagccgggaccaggaagatgaggaggatgaggaggaaggtcatggcctcagcctgaaccaggaggaggaagaagaggaagacaaggaggaggaggaggaggaagaagacgaggagaggagggaagagagggctgaggttggggccccactgagcccagaccacagcgaggaggaagaggaggaggaggaggggctggaggaagatgagccccgcttcaccatcatccccaacccactggacaggagagaggaggctggaggtgcctccagcgaggaggaaagcggtgaggacacaggtccacaggatgctcaggagtatgggaactaccagccagggtccctgtgtggctactgctccttctgcaatcgatgcactgaatgtgagagctgtcactgtgatgaggagaacatgggtgagcactgcgaccagtgccagcactgtcagttctgctatctctgcccgctggtctgcgaaacggtctgcgctccaggaagctacgttgactatttctcctcgtccctttatcaggccctggcagacatgctggaaacgccggaaccc

SEQ ID NO: 5248 - DNA, 666 bp, Homo Sapiens
gctcgctccgcacccaagcctatgtcaccctcggatttcctggataagctaatggggagaacctccggatatgatgccaggatcaggcccaattttaaaggtcccccagtgaacgtgagctgcaacattttcatcaacagctttggttccattgctgagacaaccatggactatagggtcaacatcttcctgcggcagcaatggaacgacccccgcctggcctataatgaataccctgacgactctctggacctggacccatccatgctggactccatctggaaacctgacctgttctttgccaacgagaagggggcccacttccatgagatcaccacagacaacaaattgctaaggatctcccggaatgggaatgtcctctacagcatcagaatcaccctgacactggcctgccccatggacttgaagaatttccccatggatgtccagacatgtatcatgcaactggaaagctttggatatacgatgaatgacctcatctttgagtggcaggaacagggagccgtgcaggtagcagatggactaactctgccccagtttatcttgaaggaagagaaggacttgagatactgcaccaagcactacaacacaggtaaattcacctgcattgaggcccggttccacctggagcggcagatgggttac

SEQ ID NO: 5249 - DNA, 687 bp, Homo Sapiens
aaagaccatgactccaggtctggaaaacaaccttcacagaccctatctccttcagatttcttggacaagttaatgggaaggacatcaggatatgatgcaagaatcaggccaaattttaaaggtcctccagtaaacgttacttgcaatatttttatcaacagttttggatcagtcacagaaacgaccatggactaccgagtgaatatttttctgagacaacagtggaatgattcacggctggcgtacagtgagtacccagatgactccctggacttggacccatccatgctagactccatttggaaaccagatttgttctttgccaatgagaagggtgccaacttccacgatgtcaccactgacaacaaattgctacggatttcgaaaaatggcaaagtgctctacagtatcagactcaccttgaccttatcctgtcccatggacttgaagaactttccgatggatgtccagacctgtacaatgcagctggagagttttgggtacacgatgaatgacctgatatttgagtggttaagtgatggtccagtgcaagttgctgaaggattgaccctgccccagtttattttgaaagaagagaaggaacttggctactgtacaaagcactacaacactggaaagtttacctgcattgaggtcaagtttcatctggaacgccaaatgggatat

SEQ ID NO: 5250 - DNA, 516 bp, Homo Sapiens
cagaatgagacggagcccatcgtgctggagggcaagtgcctggtggtgtgcgactccaaccccacgtccgaccccacgggcactgccctgggcatctctgtgcgctctggcagcgccaaggtggctttctctgccatcaggagcaccaaccacgagccgtccgagatgagtaatcgcaccatgatcatctacttcgaccaggtactagtgaacattgggaacaactttgattcagaacgcagcactttcatcgccccgcgcaaagggatctacagttttaacttccacgtggtaaaagtctacaacagacaaaccatacaggtgagcctcatgctaaacgggtggccggtgatttcagccttcgctggtgaccaggacgtgacccgggaggccgccagcaacggagtcctaatccaaatggagaaaggcgaccgagcatacctcaagctggagcggggaaacttgatggggggctggaagtactcgaccttctccggattcctggtgtttcctctc

SEQ ID NO: 5251 - DNA, 159 bp, Homo Sapiens
gacctgcgcgtggacaccaagtcgcgggcagcgtgggctcgccttctgcaagagcaccccaacgcgcgcaaatacaaaggagccaacaagaagggcttgtccaagggctgcttcggcctcaagctggaccgaatcggctccatgagcggcctgggatgt

SEQ ID NO: 5252 - DNA, 678 bp, Homo Sapiens
atcatcgggggcacagaatgcaagccacattcccgcccctacatggcctacctggaaattgtaacttccaacggtccctcaaaattttgtggtggtttccttataagacggaactttgtgctgacggctgctcattgtgcaggaaggtctataacagtcacccttggagcccataacataacagaggaagaagacacatggcagaagcttgaggttataaagcaattccgtcatccaaaatataacacttctactcttcaccacgatatcatgttactaaagttgaaggagaaagccagcctgaccctggctgtggggacactccccttcccatcacaattcaactttgtcccacctgggagaatgtgccgggtggctggctggggaagaacaggtgtgttgaagccgggctcagacactctgcaagaggtgaagctgagactcatggatccccaggcctgcagccacttcagagactttgaccacaatcttcagctgtgtgtgggcaatcccaggaagacaaaatctgcatttaagggagactctgggggccctcttctgtgtgctggggtggcccagggcatcgtatcctatggacggtcggatgcaaagccccctgctgtcttcacccgaatctcccattaccggccctggatcaaccagatcctgcaggcaaat

SEQ ID NO: 5253 - DNA, 201 bp, Homo Sapiens
ttcaccctcaacctgccctggaccgactgtggccacacctggaacagccccaactgtaccgaccccaagctcctcaatggctccgtgcttggcaaccacaccaagtactccaagtacaagttcacgccggcagccgagttttatgagcgtggtgtcctgcaccttcacgagagcagcgggattcatgacatcggcctgccc

SEQ ID NO: 5254 - DNA, 783 bp, Homo Sapiens
actgaaagcagaatgcactggcccggaagagaagtccacgagatgtctaagaaaggcagtaggccccaaagacaaagacgagaagtacatgaagatgcccacaagcaagtcagcccaattctgagacgaagtcctgacatcaccaaatcgcctctgacaaagtcagaacagcttctgaggatagatgaccatgatttcagcatgaggcctggctttggaggccctgccattcctgttggtgtggatgtgcaggtggagagtttggatagcatctcagaggttgacatggactttacgatgaccctctacctgaggcactactggaaggacgagaggctgtcttttccaagcaccaacaacctcagcatgacgtttgatggccggctggtcaagaagatctgggtccctgacatgtttttcgtgcactccaaacgctccttcatccacgacaccaccacagacaacgtcatgttgcgggtccagcctgatgggaaagtgctctatagtctcagggttacagtaactgcaatgtgcaacatggacttcagccgatttcccttggacacacaaacgtgctctcttgaaattgaaagctatgcctatacagaagatgacctcatgctgtactggaaaaagggcaatgactccttaaagacagatgaacggatctcactctcccagttcctcattcaggaattccacaccaccaccaaactggctttctacagcagcacaggctggtacaaccgtctctacattaatttcacgttgcgtcgccacatc

SEQ ID NO: 5255 - DNA, 663 bp, Homo Sapiens
atcgtgggcgggcacgaggcgcagccacactcccggccctacatggcctccctgcagatgcgggggaacccgggcagccacttctgcggaggcaccttgatccaccccagcttcgtgctgacggccgcgcactgcctgcgggacataccccagcgcctggtgaacgtggtgctcggagcccacaacgtgcggacgcaggagcccacccagcagcacttctcggtggctcaggtgtttctgaacaactacgacgcggagaacaaactgaacgacgttctcctcatccagctgagcagcccagccaacctcagtgcctccgtcgccacagtccagctgccacagcaggaccagccagtgccccacggcacccagtgcctggccatgggctggggccgcgtgggtgcccacgaccccccagcccaggtcctgcaggagctcaatgtcaccgtggtcaccttcttctgccggccacataacatttgcactttcgtccctcgccgcaaggccggcatctgcttcggagactcaggtggccccctgatctgtgatggcatcatccaaggaatagactccttcgtgatctggggatgtgccacccgccttttccctgacttcttcacgcgggtagccctctacgtggactggatccgttccacgctgcgc

SEQ ID NO: 5256 - DNA, 894 bp, Homo Sapiens
tacctagagctgagggaagcggcggactacgatcctttcctgctcttcagcgccaacctgaagcgggagctggctggggagcagccgtaccgccgcgctctgcggtgcctggacatgctgagcctccagggccagttcaccttcaccgccgaccggccgcagctgcactgcgcagccttcttcatcagcgagcccgaggagttcattaccatccactacgaccaggtctccatcgactgtcagggcggcgacttcctgaaggtatttgatggttggattctcaagggggagaagttccccagttcccaggatcatcctctcccctcagctgagcggtacatagatttctgtgagagtggtcttagcaggaggagcatcagatcttcccagaatgtggccatgatcttcttccgagtccatgaaccaggaaatggattcacattaaccataaagacagaccccaacctctttccttgcaatgtcatttctcagactccaaatggaaagtttaccctggtagttccacaccagcatcgaaactgcagcttctccataatttatcctgtggtgatcaaaatatctgatcttaccctgggacacgtaaatggtcttcagttaaagaaatcctcagcaggttgcgagggaataggagactttgtggagctgctgggaggaactggattggacccttccaagatgacgcctttagctgatctctgctacccctttcatggcccggcccagatgaaagttggctgtgacaacactgtggtgcgcatggtctccagtggaaaacacgtaaatcgtgtgacttttgagtatcgtcagctggagccgtacgagctggaaaacccaaatggaaacagtatcggggaattctgtttgtctggtctt

SEQ ID NO: 5257 - DNA, 639 bp, Homo Sapiens
cggtgcccaggctgcgggcaaggggtgcaggcgggttgtccagggggctgcgtggaggaggaggatggggggtcgccagccgagggctgcgcggaagctgagggctgtctcaggagggaggggcaggagtgcggggtctacacccctaactgcgccccaggactgcagtgccatccgcccaaggacgacgaggcgcctttgcgggcgctgctgctcggccgaggccgctgccttccggcccgcgcgcctgctgttgcagaggagaatcctaaggagagtaaaccccaagcaggcactgcccgcccacaggatgtgaaccgcagagaccaacagaggaatccaggcacctctaccacgccctcccagcccaattctgcgggtgtccaagacactgagatgggcccatgccgtagacatctggactcagtgctgcagcaactccagactgaggtctaccgaggggctcaaacactctacgtgcccaattgtgaccatcgaggcttctaccggaagcggcagtgccgctcctcccaggggcagcgccgaggtccctgctggtgtgtggatcggatgggcaagtccctgccagggtctccagatggcaatggaagctcctcctgccccactgggagtagcggc

SEQ ID NO: 5258 - DNA, 756 bp, Homo Sapiens
ctgggctccttcgtgcactgcgagccctgcgacgagaaagccctctccatgtgcccccccagccccctgggctgcgagctggtcaaggagccgggctgcggctgctgcatgacctgcgccctggccgaggggcagtcgtgcggcgtctacaccgagcgctgcgcccaggggctgcgctgcctcccccggcaggacgaggagaagccgctgcacgccctgctgcacggccgcggggtttgcctcaacgaaaagagctaccgcgagcaagtcaagatcgagagagactcccgtgagcacgaggagcccaccacctctgagatggccgaggagacctactcccccaagatcttccggcccaaacacacccgcatctccgagctgaaggctgaagcagtgaagaaggaccgcagaaagaagctgacccagtccaagtttgtcgggggagccgagaacactgcccacccccggatcatctctgcacctgagatgagacaggagtctgagcagggcccctgccgcagacacatggaggcttccctgcaggagctcaaagccagcccacgcatggtgccccgtgctgtgtacctgcccaattgtgaccgcaaaggattctacaagagaaagcagtgcaaaccttcccgtggccgcaagcgtggcatctgctggtgcgtggacaagtacgggatgaagctgccaggcatggagtacgttgacggggactttcagtgccacaccttcgacagcagcaacgttgag

SEQ ID NO: 5259 - DNA, 780 bp, Homo Sapiens
ctgaagatcgcagccttcaacatccagacatttggggagaccaagatgtccaatgccaccctcgtcagctacattgtgcagatcctgagccgctatgacatcgccctggtccaggaggtcagagacagccacctgactgccgtggggaagctgctggacaacctcaatcaggatgcaccagacacctatcactacgtggtcagtgagccactgggacggaacagctataaggagcgctacctgttcgtgtacaggcctgaccaggtgtctgcggtggacagctactactacgatgatggctgcgagccctgcgggaacgacaccttcaaccgagagccagccattgtcaggttcttctcccggttcacagaggtcagggagtttgccattgttcccctgcatgcggccccgggggacgcagtagccgagatcgacgctctctatgacgtctacctggatgtccaagagaaatggggcttggaggacgtcatgttgatgggcgacttcaatgcgggctgcagctatgtgagaccctcccagtggtcatccatccgcctgtggacaagccccaccttccagtggctgatccccgacagcgctgacaccacagctacacccacgcactgtgcctatgacaggatcgtggttgcagggatgctgctccgaggcgccgttgttcccgactcggctcttccctttaacttccaggctgcctatggcctgagtgaccaactggcccaagccatcagtgaccactatccagtggaggtgatgctgaag

SEQ ID NO: 5260 - DNA, 1221 bp, Homo Sapiens
tcccaggtgagtcagaactgccacaatggcagctatgaaatcagcgtcctgatgatgggcaactcagcctttgcagagcccctgaaaaacttggaagatgcggtgaatgaggggctggaaatagtgagaggacgtctgcaaaatgctggcctaaatgtgactgtgaacgctactttcatgtattcggatggtctgattcataactcaggcgactgccggagtagcacctgtgaaggcctcgacctactcaggaaaatttcaaatgcacaacggatgggctgtgtcctcatagggccctcatgtacatactccaccttccagatgtaccttgacacagaattgagctaccccatgatctcagctggaagttttggattgtcatgtgactataaagaaaccttaaccaggctgatgtctccagctagaaagttgatgtacttcttggttaacttttggaaaaccaacgatctgcccttcaaaacttattcctggagcacttcgtatgtttacaagaatggtacagaaactgaggactgtttctggtaccttaatgctctggaggctagcgtttcctatttctcccacgaactcggctttaaggtggtgttaagacaagataaggagtttcaggatatcttaatggaccacaacaggaaaagcaatgtgattattatgtgtggtggtccagagttcctctacaagctgaagggtgaccgagcagtggctgaagacattgtcattattctagtggatcttttcaatgaccagtacttggaggacaatgtcacagcccctgactatatgaaaaatgtccttgttctgacgctgtctcctgggaattcccttctaaatagctctttctccaggaatctatcaccaacaaaacgagactttgctcttgcctatttgaatggaatcctgctctttggacatatgctgaagatatttcttgaaaatggagaaaatattaccacccccaaatttgctcatgctttcaggaatctcacttttgaagggtatgacggtccagtgaccttggatgactggggggatgttgacagtaccatggtgcttctgtatacctctgtggacaccaagaaatacaaggttcttttgacctatgatacccacgtaaataagacctatcctgtggatatgagccccacattcacttggaagaactctaaacttcctaatgatattacaggccggggccctcag

SEQ ID NO: 5261 - DNA, 732 bp, Homo Sapiens
cagcctaatgagctttctggctccatagatcatcaaacttcagttcagcaacttccaggtgagttcttttcacttgaaaacccttctgatgctgaggctttatatgagacttcttcaggcctgaacactttaagtgagcatggttccagtgagcatggttcaagcaagcacactgtggccgagcacacttctggagaacatgctgagagtgagcatgcttcaggtgagcccgctgcgactgaacatgctgaaggtgagcatactgtaggtgagcagccttcaggagaacagccttcaggtgaacacctctccggagaacagcctttgagtgagcttgagtcaggtgaacagccttcagatgaacagccttcaggtgaacatggctccggtgaacagccttctggtgagcaggcctcgggtgaacagccttcaggtgagcacgcttcaggggaacaggcttcaggtgcaccaatttcaagcacatctacaggcacaatattaaattgctacacatgtgcttatatgaatgatcaaggaaaatgtcttcgtggagagggaacctgcatcactcagaattcccagcagtgcatgttaaagaagatctttgaaggtggaaaactccaattcatggttcaagggtgtgagaacatgtgcccatctatgaacctcttctcccatggaacgaggatgcaaattatatgctgtcgaaatcaatctttctgcaataagatc

SEQ ID NO: 5262 - DNA, 363 bp, Homo Sapiens
gccacgggggccgagggcaaaaggaagctgcagatcggggtcaagaagcgggtggaccactgtcccatcaaatcgcgcaaaggggatgtcctgcacatgcactacacggggaagctggaagatgggacagagtttgacagcagcctgccccagaaccagccctttgtcttctcccttggcacaggccaggtcatcaagggctgggaccaggggctgctggggatgtgtgagggggaaaagcgcaagctggtgatcccatccgagctagggtatggagagcggggagctcccccaaagattccaggcggtgcaaccctggtgttcgaggtggagctgctcaaaatagagcgacgaactgagctg

SEQ ID NO: 5263 - DNA, 348 bp, Homo Sapiens
gctatacttggtagatcagaaactcaggagtgtcttttctttaatgctaattgggaaaaagacagaaccaatcaaactggtgttgaaccgtgttatggtgacaaagataaacggcggcattgttttgctacctggaagaatatttctggttccattgaaatagtgaaacaaggttgttggctggatgatatcaactgctatgacaggactgattgtgtagaaaaaaaagacagccctgaagtatatttttgttgctgtgagggcaatatgtgtaatgaaaagttttcttattttccagagatggaagtcacacagcccacttcaaatccagttacacctaagccaccc

SEQ ID NO: 5264 - DNA, 1062 bp, Homo Sapiens
gcgaagctgattgcgctcaccctcttggggatgggactggcactcttcaggaaccaccagtcttcttaccaaacacgacttaatgctctccgagaggtacaacccgtagaacttcctaactgtaatttagttaaaggaatcgaaactggctctgaagacttggagatactgcctaatggactggctttcattagctctggattaaagtatcctggaataaagagcttcaaccccaacagtcctggaaaaatacttctgatggacctgaatgaagaagatccaacagtgttggaattggggatcactggaagtaaatttgatgtatcttcatttaaccctcatgggattagcacattcacagatgaagataatgccatgtacctcctggtggtgaaccatccagatgccaagtccacagtggagttgtttaaatttcaagaagaagaaaaatcgcttttgcatctaaaaaccatcagacataaacttctgcctaatttgaatgatattgttgctgtgggacctgagcacttttatggcacaaatgatcactattttcttgacccctacttacaatcctgggagatgtatttgggtttagcgtggtcgtatgttgtctactatagtccaagtgaagttcgagtggtggcagaaggatttgattttgctaatggaatcaacatttcacccgatggcaagtatgtctatatagctgagttgctggctcataagattcatgtgtatgaaaagcatgctaattggactttaactccattgaagtcccttgactttaataccctcgtggataacatatctgtggatcctgagacaggagacctttgggttggatgccatcccaatggcatgaaaatcttcttctatgactcagagaatcctcctgcatcagaggtgcttcgaatccagaacattctaacagaagaacctaaagtgacacaggtttatgcagaaaatggcacagtgttgcaaggcagtacagttgcctctgtgtacaaagggaaactgctgattggcacagtgtttcacaaagctctttactgtgagctc

SEQ ID NO: 5265 - DNA, 1197 bp, Homo Sapiens
agtacccagacccagagttcatgctccgttccctcagcacaggagcccttggtcaatggaatacaagtactcatggagaactcggtgacttcatcagcctacccaaaccccagcatcctgattgccatgaatctggccggagcctacaacttgaaggcccagaagctcctgacttaccagctcatgtccagcgacaacaacgatctaaccattgggcagctcggcctcaccatcatggccctcacctcctcctgccgagaccctggggataaagtatccattctacaaagacaaatggagaactgggcaccttccagccccaacgctgaagcatcagccttctatgggcccagtctagcgatcttggcactgtgccagaagaactctgaggcgaccttgccgatagccgtccgctttgccaagaccctgctggccaactcctctcccttcaatgtagacacaggagcaatggcaaccttggctctgacctgtatgtacaacaagatccctgtaggttcagaggaaggttacagatccctgtttggtcaggtactaaaggatattgtggagaaaatcagcatgaagatcaaagataatggcatcattggagacatctacagtactggcctcgccatgcaggctctctctgtaacacctgagccatctaaaaaggaatggaactgcaagaagactacggatatgatactcaatgagattaagcaggggaaattccacaaccccatgtccattgctcaaatcctcccttccctgaaaggcaagacatacctagatgtgccccaggtcacttgtagtcctgatcatgaggtacaaccaactctacccagcaaccctggccctggccccacctctgcatctaacatcactgtcatatacaccataaataaccagctgaggggggttgagctgctcttcaacgagaccatcaatgttagtgtgaaaagtgggtcagtgttacttgttgtcctagaggaagcacagcgcaaaaatcctatgttcaaatttgaaaccacaatgacatcttggggccttgtcgtctcttctatcaacaatatcgcggaaaatgttaatcacaagacatactggcagtttcttagtggtgtaacacctttgaatgaaggggttgctgactacatacccttcaaccacgagcacatcacagccaatttcacacagtac

SEQ ID NO: 5266 - DNA, 519 bp, Homo Sapiens
gctgtgatgccccctacaccaccaccccagggagagtatctgccagatatggggctgggaattgatggcgtgaaacccccccatgcctacggggctaagaaaggcaagaatggagggccagcctatgagatgcctgcatttaccgccgagctaaccgcacctttcccaccggtgggggccccagtgaagtttaacaaactgctgtataacggcagacagaactacaacccgcagacaggcatcttcacctgtgaggtccctggtgtctactactttgcataccacgttcactgcaaggggggcaacgtgtgggttgctctattcaagaacaacgagcccgtgatgtacacgtacgacgagtacaaaaagggcttcctggaccaggcatctgggagtgcagtgctgctgctcaggcccggagaccgggtgttcctccagatgccctcagaacaggctgcaggactgtatgccgggcagtatgtccactcctccttttcaggatatttattgtatcccatg

SEQ ID NO: 5267 - DNA, 1200 bp, Homo Sapiens
gagcctgccgtctacttcaaggagcagtttctggacggagacgggtggacttcccgctggatcgaatccaaacacaagtcagattttggcaaattcgttctcagttccggcaagttctacggtgacgaggagaaagataaaggtttgcagacaagccaggatgcacgcttttatgctctgtcggccagtttcgagcctttcagcaacaaaggccagacgctggtggtgcagttcacggtgaaacatgagcagaacatcgactgtgggggcggctatgtgaagctgtttcctaatagtttggaccagacagacatgcacggagactcagaatacaacatcatgtttggtcccgacatctgtggccctggcaccaagaaggttcatgtcatcttcaactacaagggcaagaacgtgctgatcaacaaggacatccgttgcaaggatgatgagtttacacacctgtacacactgattgtgcggccagacaacacctatgaggtgaagattgacaacagccaggtggagtccggctccttggaagacgattgggacttcctgccacccaagaagataaaggatcctgatgcttcaaaaccggaagactgggatgagcgggccaagatcgatgatcccacagactccaagcctgaggactgggacaagcccgagcatatccctgaccctgatgctaagaagcccgaggactgggatgaagagatggacggagagtgggaacccccagtgattcagaaccctgagtacaagggtgagtggaagccccggcagatcgacaacccagattacaagggcacttggatccacccagaaattgacaaccccgagtattctcccgatcccagtatctatgcctatgataactttggcgtgctgggcctggacctctggcaggtcaagtctggcaccatctttgacaacttcctcatcaccaacgatgaggcatacgctgaggagtttggcaacgagacgtggggcgtaacaaaggcagcagagaaacaaatgaaggacaaacaggacgaggagcagaggcttaaggaggaggaagaagacaagaaacgcaaagaggaggaggaggcagaggacaaggaggatgatgaggacaaagatgaggatgaggaggatgaggaggacaaggaggaagatgaggaggaagatgtccccggccaggccaaggacgagctg

SEQ ID NO: 5268 - DNA, 1326 bp, Homo Sapiens
gaccccgtgctctgcttcacccagtatgaagaatcctccggcaagtgcaagggcctcctggggggtggtgtcagcgtggaagactgctgtctcaacactgcctttgcctaccagaaacgtagtggtgggctctgtcagccttgcaggtccccacgatggtccctttggtccacatgggccccctgttcggtgacgtgctctgagggctcccagctgcggtaccggcgctgtgtgggctggaatgggcagtgctctggaaaggtggcacctgggaccctggagtggcagctccaggcctgtgaggaccagcagtgctgtcctgagatgggcggctggtctggctgggggccctgggagccttgctctgtcacctgctccaaagggacccggacccgcaggcgagcctgtaatcaccctgctcccaagtgtgggggccactgcccaggacaggcacaggaatcagaggcctgtgacacccagcaggtctgccccacacacggggcctgggccacctggggcccctggaccccctgctcagcctcctgccacggtggaccccacgaacctaaggagacacgaagccgcaagtgttctgcacctgagccctcccagaaacctcctgggaagccctgcccggggctagcctacgagcagcggaggtgcaccggcctgccaccctgcccagtggctgggggctgggggccttggggccctgtgagcccctgccctgtgacctgtggcctgggccagaccatggaacaacggacgtgcaatcaccctgtgccccagcatgggggccccttctgtgctggcgatgccacccggacccacatctgcaacacagctgtgccctgccctgtggatggggagtgggactcgtggggggagtggagcccctgtatccgacggaacatgaagtccatcagctgtcaagaaatcccgggccagcagtcacgcgggaggacctgcaggggccgcaagtttgacggacatcgatgtgccgggcaacagcaggatatccggcactgctacagcatccagcactgccccttgaaaggatcatggtcagagtggagtacctgggggctgtgcatgcccccctgtggacctaatcctacccgtgcccgccagcgcctctgcacacccttgctccccaagtacccgcccaccgtttccatggtcgaaggtcagggcgagaagaacgtgaccttctgggggagaccgctgccacggtgtgaggagctacaagggcagaagctggtggtggaggagaaacgaccatgtctacacgtgcctgcttgcaaagaccctgaggaagaggaactc

SEQ ID NO: 5269 - DNA, 366 bp, Homo Sapiens
gggagtgcctcggcccaatctaggaccttggcaggtggcatccatgccacagacctcaatgacaagagtgtgcagtgtgccctggactttgccatcagcgagtacaacaaggtcattaataaggatgagtactacagccgccctctgcaggtgatggctgcctaccagcagatcgtgggtggggtgaactactacttcaatgtgaagttcggtcgaaccacatgcaccaagtcccagcccaacttggacaactgtcccttcaatgaccagccaaaactgaaagaggaagagttctgctctttccagatcaatgaagttccctgggaggataaaatttccattctgaactacaagtgccggaaagtc

SEQ ID NO: 5270 - DNA, 660 bp, Homo Sapiens
cagagtgtgaacgatcccgggaacatgtcctttgtgaaggagacggtggacaagctgttgaaaggctacgacattcgcctaagacccgacttcgggggtcccccggtctgcgtggggatgaacatcgacatcgccagcatcgacatggtttccgaagtcaacatggattataccttaaccatgtattttcaacaatattggagagataaaaggctcgcctattctgggatccctctcaacctcacgcttgacaatcgagtggctgaccagctatgggtgcccgacacatatttcttaaatgacaaaaagtcatttgtgcatggagtgacagtgaaaaaccgcatgatccgtcttcaccctgatgggacagtgctgtatgggctcagaatcaccacgacagcagcatgcatgatggacctcaggagataccccctggacgagctgaactgcactctggaaattgaaagctatggctacaccacggatgacattgagttttactggcgaggcggggacaaggctgttaccggagtggaaaggattgagctcccgcagttctccatcgtggagcaccgtctggtctcgaggaatgttgtcttcgccacaggtgcctatcctcgactgtcactgagctttcggttgaagaggaacattggatac

SEQ ID NO: 5271 - DNA, 720 bp, Homo Sapiens
agaaaacccaagaggaagcgatggacagggcaggtggaaatgcccaagccaagtcacttatataagaagaaccttgatgtgaccaagatccggaagggaaagcctcagcagcttctcagagtggacgagcacgacttcagcatgagacccgccttcggaggccctgccatcccggtgggcgtggacgtacaggtggagagcctggacagcatctccgaggtggacatggacttcactatgaccctgtacctgcggcattactggaaggatgagaggctagctttctccagcgccagcaacaagagcatgaccttcgatggccggctggtgaagaagatctgggtccctgatgtcttctttgttcactccaaaagatcgttcactcatgacaccaccactgacaacatcatgctgagggtgttcccagatggacacgtgctgtacagcatgaggattacggtcactgccatgtgcaacatggacttcagccactttcccctggactcccagacctgttctttggagctggagagctatgcctatacagatgaagatctaatgctgtactggaagaatggggatgaatccctaaaaacagatgagaagatctccttgtctcagtttctgattcagaaatttcacacaacttccaggctggccttctacagcagcactggctggtacaaccgtctgtacattaacttcacgttgcgtcgccac

SEQ ID NO: 5272 - DNA, 1728 bp, Homo Sapiens
acgcggtgcccagatggtcagttctgccctgtggcctgctgcctggaccccggaggagccagctacagctgctgccgtccccttctggacaaatggcccacaacactgagcaggcatctgggtggcccctgccaggttgatgcccactgctctgccggccactcctgcatctttaccgtctcagggacttccagttgctgccccttcccagaggccgtggcatgcggggatggccatcactgctgcccacggggcttccactgcagtgcagacgggcgatcctgcttccaaagatcaggtaacaactccgtgggtgccatccagtgccctgatagtcagttcgaatgcccggacttctccacgtgctgtgttatggtcgatggctcctgggggtgctgccccatgccccaggcttcctgctgtgaagacagggtgcactgctgtccgcacggtgccttctgcgacctggttcacacccgctgcatcacacccacgggcacccaccccctggcaaagaagctccctgcccagaggactaacagggcagtggccttgtccagctcggtcatgtgtccggacgcacggtcccggtgccctgatggttctacctgctgtgagctgcccagtgggaagtatggctgctgcccaatgcccaacgccacctgctgctccgatcacctgcactgctgcccccaagacactgtgtgtgacctgatccagagtaagtgcctctccaaggagaacgctaccacggacctcctcactaagctgcctgcgcacacagtgggggatgtgaaatgtgacatggaggtgagctgcccagatggctatacctgctgccgtctacagtcgggggcctggggctgctgcccttttacccaggctgtgtgctgtgaggaccacatacactgctgtcccgcggggtttacgtgtgacacgcagaagggtacctgtgaacaggggccccaccaggtgccctggatggagaaggccccagctcacctcagcctgccagacccacaagccttgaagagagatgtcccctgtgataatgtcagcagctgtccctcctccgatacctgctgccaactcacgtctggggagtggggctgctgtccaatcccagaggctgtctgctgctcggaccaccagcactgctgcccccagggctacacgtgtgtagctgaggggcagtgtcagcgaggaagcgagatcgtggctggactggagaagatgcctgcccgccgggcttccttatcccaccccagagacatcggctgtgaccagcacaccagctgcccggtggggcagacctgctgcccgagcctgggtgggagctgggcctgctgccagttgccccatgctgtgtgctgcgaggatcgccagcactgctgcccggctggctacacctgcaacgtgaaggctcgatcctgcgagaaggaagtggtctctgcccagcctgccaccttcctggcccgtagccctcacgtgggtgtgaaggacgtggagtgtggggaaggacacttctgccatgataaccagacctgctgccgagacaaccgacagggctgggcctgctgtccctaccgccagggcgtctgttgtgctgatcggcgccactgctgtcctgctggcttccgctgcgcagccaggggtaccaagtgtttgcgcagggaggccccgcgctgggacgcccctttgagggacccagccttgagacagctgctg

SEQ ID NO: 5273 - DNA, 1929 bp, Homo Sapiens
tcagctctaagggactcagcactaaatctcttcaatgatcccatgtggaatcagcaatggtacttgcaagataccaggatgacggcagccctgcccaagctggaccttcatgtgatacctgtttggcaaaaaggcattacgggcaaaggagttgttatcaccgtactggatgatggtttggagtggaatcacacggacatttatgccaactatgatccagaggctagctatgattttaatgataatgaccatgatccatttccccgatatgatcccacaaacgagaacaaacacgggaccagatgtgcaggagaaattgccatgcaagcaaataatcacaaatgcggggttggagttgcatacaattccaaagttggaggcataagaatgctggatggcattgtgacggatgctattgaggccagttcaattggattcaatcctggacacgtggatatttacagtgcaagctggggccctaatgatgatgggaaaactgtggaggggcctggccggctagcccagaaggcttttgaatatggtgtcaaacaggggagacaggggaaggggtccatcttcgtctgggcttcgggaaacggggggcgtcagggagataattgtgactgtgatggctacacagacagcatctacaccatctccatcagcagtgcctcccagcaaggcctatccccctggtacgctgagaagtgctcctccacactggccacctcttacagcagcggagattacaccgaccagagaatcacgagcgctgacctgcacaatgactgcacggagacgcacacaggcacctcggcctctgcacctctggctgctggcatcttcgctctggccctggaagcaaacccaaatctcacctggcgagatatgcagcacctggttgtctggacctctgagtatgacccgctggccaataaccctggatggaaaaagaatggagcaggcttgatggtgaatagtcgatttggatttggcttgctaaatgccaaagctctggtggatttagctgaccccaggacctggaggagcgtgcctgagaagaaagagtgtgttgtaaaggacaatgactttgagcccagagccctgaaagctaatggagaagttatcattgaaattccaacaagagcttgtgaaggacaagaaaatgctatcaagtccctggagcatgtacaatttgaagcaacaattgaatattcccgaagaggagaccttcatgtcacacttacttctgctgctggaactagcactgtgctcttggctgaaagagaacgggatacatctcctaatggctttaagaattgggacttcatgtctgttcacacatggggagagaaccctataggtacttggactttgagaattacagacatgtctggaagaattcaaaatgaaggaagaattgtgaactggaagctgattttgcacgggacctcttctcagccagagcatatgaagcagcctcgtgtgtacacgtcctacaacactgttcagaatgacagaagaggggtggagaagatggtggatccaggggaggagcagcccacacaagagaaccctaaggagaacaccctggtgtccaaaagccccagcagcagcagcgtagggggccggagggatgagttggaggagggagccccttccgaggccatgctgcgactcctgcaaagtgctttcagtaaaaactcaccgccaaagcaatcaccaaagaagtccccaactgcaaagctcaacatcccttatgaaaacttctacgaagccctggaaaagctgaacaaaccttcccagcttaaagactctgaagacagtctgtataatgactatgttgatgttttttataacactaaaccttacaagcacagagacgaccggctgcttcaagctctggtggacattctgaatgaggaaaat

SEQ ID NO: 5274 - DNA, 969 bp, Homo Sapiens
cagaactgcagcgggccgtgccggtgcccggacgagccggcgccgcgctgcccggcgggcgtgagcctcgtgctggacggctgcggctgctgccgcgtctgcgccaagcagctgggcgagctgtgcaccgagcgcgacccctgcgacccgcacaagggcctcttctgtgacttcggctccccggccaaccgcaagatcggcgtgtgcaccgccaaagatggtgctccctgcatcttcggtggtacggtgtaccgcagcggagagtccttccagagcagctgcaagtaccagtgcacgtgcctggacggggcggtgggctgcatgcccctgtgcagcatggacgttcgtctgcccagccctgactgccccttcccgaggagggtcaagctgcccgggaaatgctgcgaggagtgggtgtgtgacgagcccaaggaccaaaccgtggttgggcctgccctcgcggcttaccgactggaagacacgtttggcccagacccaactatgattagagccaactgcctggtccagaccacagagtggagcgcctgttccaagacctgtgggatgggcatctccacccgggttaccaatgacaacgcctcctgcaggctagagaagcagagccgcctgtgcatggtcaggccttgcgaagctgacctggaagagaacattaagaagggcaaaaagtgcatccgtactcccaaaatctccaagcctatcaagtttgagctttctggctgcaccagcatgaagacataccgagctaaattctgtggagtatgtaccgacggccgatgctgcaccccccacagaaccaccaccctgccggtggagttcaagtgccctgacggcgaggtcatgaagaagaacatgatgttcatcaagacctgtgcctgccattacaactgtcccggagacaatgacatctttgaatcgctgtactacaggaagatgtacggagacatggca

SEQ ID NO: 5275 - DNA, 1221 bp, Homo Sapiens
cagctgcacgttgagcatgatggtgagagttgcagtaacagctcccaccagcagattctggagacaggtgagggctcccccagcctcaagatagcccctgccaatgctgactttgccttccgcttctactacctgatcgcttcggagaccccggggaagaacatctttttctccccgctgagcatctcggcggcctacgccatgctttccctgggggcctgctcacacagccgcagccagatccttgagggcctgggcttcaacctcaccgagctgtctgagtccgatgtccataggggcttccagcacctcctgcacactctcaacctccccggccatgggctggaaacacgcgtgggcagtgctctgttcctgagccacaacctgaagttccttgcaaaattcctgaatgacaccatggccgtctatgaggctaaactcttccacaccaacttctacgacactgtgggcacaatccagcttatcaacgaccacgtcaagaaggaaactcgagggaagattgtggatttggtcagtgagctcaagaaggacgtcttgatggtgctggtgaattacatttacttcaaagccctgtgggagaaaccattcatttcctcaaggaccactcccaaagacttttatgttgatgagaacacaacagtccgggtgcccatgatgctgcaggaccaggagcatcactggtatcttcatgacagatacttgccctgctcggtgctacggatggattacaaaggagacgcaaccgtgtttttcattctccctaaccaaggcaaaatgagggagattgaagaggttctgactccagagatgctaatgaggtggaacaacttgttgcggaagaggaatttttacaagaagctagagttgcatcttcccaagttctccatttctggctcctatgtattagatcagattttgcccaggctgggcttcacggatctgttctccaagtgggctgacttatccggcatcaccaaacagcaaaaactggaggcatccaaaagtttccacaaggccaccttggacgtggatgaggctggcaccgaggctgcagcagccaccagcttcgcgatcaaattcttctctgcccagaccaatcgccacatcctgcgattcaaccggcccttccttgtggtgatcttttccaccagcacccagagtgtcctctttctgggcaaggtcgtcgaccccacgaaacca

SEQ ID NO: 5276 - DNA, 252 bp, Homo Sapiens
aacataggttctatgatttccaacatgaatgcagccagagcagaatttcaagcaagaattgatgctatcaagcaatatatgcattttcgaaatgtaagcaaagatatggaaaagagggttattaaatggtttgactacctgtggaccaacaaaaaaacagttgatgagaaagaagtcttaaagtatctacctgataaactaagagcagaaattgccatcaacgttcacttagacacattaaaaaaggtacgc

SEQ ID NO: 5277 - DNA, 687 bp, Homo Sapiens
ctgcacaccaagggcgcccttcccctggatacggtcactttctacaaggtcattcccaaaagcaagttcgtcttggtgaagttcgacacccagtacccctacggtgagaagcaggatgagttcaagcgtcttgctgaaaactcggcttccagcgatgatctcttggtggcagaggtggggatctcagattatggtgacaagctgaacatggagctgagtgagaaatacaagctggacaaagagagctacccagtcttctacctcttccgggatggggactttgagaacccagtcccatacactggggcagttaaggttggagccatccagcgctggctgaaggggcaaggggtctacctaggtatgcctggttgcctgcctgtatacgacgccctggccggggagttcatcagggcctctggtgtggaggcccgccaggccctcttgaagcaggggcaagataacctctcaagtgtgaaggagactcagaagaagtgggccgagcaatacctgaagatcatggggaagatcttagaccaaggggaggacttcccagcatcagagatgacacggatcgccaggctgattgagaagaacaagatgagtgacgggaagaaggaggagctccagaagagcttaaacatcctgactgccttccagaagaagggggccgagaaagaggagctg

SEQ ID NO: 5278 - DNA, 1443 bp, Homo Sapiens
tccgacgtgctagaactcacggacgacaacttcgagagtcgcatctccgacacgggctctgcgggcctcatgctcgtcgagttcttcgccccctggtgtggacactgcaagagacttgcacctgagtatgaagctgcagctaccagattaaaaggaatagtcccattagcaaaggttgattgcactgccaacactaacacctgtaataaatatggagtcagtggatatccaaccctgaagatatttagagatggtgaagaagcaggtgcttatgatggacctaggactgctgatggaattgtcagccacttgaagaagcaggcaggaccagcttcagtgcctctcaggactgaggaagaatttaagaaattcattagtgataaagatgcctctatagtaggttttttcgatgattcattcagtgaggctcactccgagttcctaaaagcagccagcaacttgagggataactaccgatttgcacatacgaatgttgagtctctggtgaacgagtatgatgataatggagagggtatcatcttatttcgtccttcacatctcactaacaagtttgaggacaagactgtggcatatacagagcaaaaaatgaccagtggcaaaattaaaaagtttatccaggaaaacatttttggtatctgccctcacatgacagaagacaataaagatttgatacagggcaaggacttacttattgcttactatgatgtggactatgaaaagaacgctaaaggttccaactactggagaaacagggtaatgatggtggcaaagaaattcctggatgctgggcacaaactcaactttgctgtagctagccgcaaaacctttagccatgaactttctgattttggcttggagagcactgctggagagattcctgttgttgctatcagaactgctaaaggagagaagtttgtcatgcaggaggagttctcgcgtgatgggaaggctctggagaggttcctgcaggattactttgatggcaatctgaagagatacctgaagtctgaacctatcccagagagcaatgatgggcctgtgaaggtagtggtagcagagaattttgatgaaatagtgaataatgaaaataaagatgtgctgattgaattttatgccccttggtgtggtcactgtaagaacctggagcccaagtataaagaacttggcgagaagctcagcaaagacccaaatatcgtcatagccaagatggatgccacagccaatgatgtgccttctccatatgaagtcagaggttttcctaccatatacttctctccagccaacaagaagctaaatccaaagaaatatgaaggtggccgtgaattaagtgattttattagctatctacaaagagaagctacaaacccccctgtaattcaagaagaaaaacccaagaagaagaagaaggcacaggaggatctc

SEQ ID NO: 5279 - DNA, 201 bp, Homo Sapiens
tcctgggccatttactacctgtacaactccttcaccacgacactgccgtggaaacagtgcgacaacccctggaacacagaccgctgcttctccaactacagcatggtcaacactaccaacatgaccagcgctgtggtggagttctgggagcgcaacatgcatcagatgacggacgggctggataagccaggtcagatccgc

SEQ ID NO: 5280 - DNA, 696 bp, Homo Sapiens
cgctgcggtctagcgggcgcggcgggcggcgcgcagagaggattatctgaaccttcttctattgcaaaacatgaagatagtttgcttaaggatttatttcaagactacgaaagatgggttcgtcctgtggaacacctgaatgacaaaataaaaataaaatttggacttgcaatatctcaattggtggatgtggatgagaaaaatcagttaatgacaacaaacgtctggttgaaacaggaatggatagatgtaaaattaagatggaaccctgatgactatggtggaataaaagttatacgtgttccttcagactctgtctggacaccagacatcgttttgtttgataatgcagatggacgttttgaagggaccagtacgaaaacagtcatcaggtacaatggcactgtcacctggactccaccggcaaactacaaaagttcctgtaccatagatgtcacgtttttcccatttgaccttcagaactgttccatgaaatttggttcttggacttatgatggatcacaggttgatataattctagaggaccaagatgtagacaagagagatttttttgataatggagaatgggagattgtgagtgcaacagggagcaaaggaaacagaaccgacagctgttgctggtatccgtatgtcacttactcatttgtaatcaagcgcctgcctctcttttatacc

SEQ ID NO: 5281 - DNA, 969 bp, Homo Sapiens
tactcgcgggagaagaaccagcccaagccgtccccgaaacgcgagtccggagaggagttccgcatggagaagttgaaccagctgtgggagaaggcccagcgactgcatcttcctcccgtgaggctggccgagctccacgctgatctgaagatacaggagagggacgaactcgcctggaagaaactaaagcttgacggcttggacgaagatggggagaaggaagcgagactcatacgcaacctcaatgtcatcttggccaagtatggtctggacggaaagaaggacgctcggcaggtgaccagcaactccctcagtggcacccaggaagacgggctggatgaccccaggctggaaaagctgtggcacaaggcgaagacctctgggaaattctccggcgaagaactggacaagctctggcgggagttcctgcatcacaaagagaaagttcacgagtacaacgtcctgctggagaccctgagcaggaccgaagaaatccacgagaacgtcattagcccctcggacctgagcgacatcaagggcagcgtcctgcacagcaggcacacggagctgaaggagaagctgcgcagcatcaaccagggcctggaccgcctgcgcagggtcagccaccagggctacagcactgaggctgagttcgaggagcccagggtgattgacctgtgggacctggcgcagtccgccaacctcacggacaaggagctggaggcgttccgggaggagctcaagcacttcgaagccaaaatcgagaagcacaaccactaccagaagcagctggagattgcgcacgagaagctgaggcacgcagagagcgtgggcgacggcgagcgtgtgagccgcagccgcgagaagcacgccctgctggaggggcggaccaaggagctgggctacacggtgaagaagcatctgcaggacctgtccggcaggatctccagagctcggcacaacgaactc

SEQ ID NO: 5282 - DNA, 645 bp, Homo Sapiens
cgcgtggccaatgcggaggaaaagctgatggacgaccttctgaacaaaacccgttacaataacctgatccgcccagccaccagctcctcacagctcatctccatcaagctgcagctctccctggcccagcttatcagcgtgaatgagcgagagcagatcatgaccaccaatgtctggctgaaacaggaatggactgattaccgcctgacctggaacagctcccgctacgagggtgtgaacatcctgaggatccctgcaaagcgcatctggttgcctgacatcgtgctttacaacaacgccgacgggacctatgaggtgtctgtctacaccaacttgatagtccggtccaacggcagcgtcctgtggctgccccctgccatctacaagagcgcctgcaagattgaggtgaagtactttcccttcgaccagcagaactgcaccctcaagttccgctcctggacctatgaccacacggagatagacatggtcctcatgacgcccacagccagcatggatgactttactcccagtggtgagtgggacatagtggccctcccagggagaaggacagtgaacccacaagaccccagctacgtggacgtgacttacgacttcatcatcaagcgcaagcctctgttctacacc

SEQ ID NO: 5283 - DNA, 375 bp, Homo Sapiens
tcagattcagaagaggaaatgaaagcattagaagcagatttcttgaccaatatgcatacatcaaagattagtaaagcacatgttccctcttggaagatgactctgctaaatgtttgcagtcttgtaaataatttgaacagcccagctgaggaaacaggagaagttcatgaagaggagcttgttgcaagaaggaaacttcctactgctttagatggctttagcttggaagcaatgttgacaatataccagctccacaaaatctgtcacagcagggcttttcaacactgggagttaatccaggaagatattcttgatactggaaatgacaaaaatggaaaggaagaagtcataaagagaaaaattccttatattctg

SEQ ID NO: 5284 - DNA, 300 bp, Homo Sapiens
agcaacactcaagctgagaggtccataataggcatgatcgacatgtttcacaaatacaccagacgtgatgacaagattgacaagccaagcctgctgacgatgatgaaggagaacttccccaacttccttagtgcctgtgacaaaaagggcacaaattacctcgccgatgtctttgagaaaaaggacaagaatgaggataagaagattgatttttctgagtttctgtccttgctgggagacatagccacagactaccacaagcagagccatggagcagcgccctgttccgggggcagccag

SEQ ID NO: 5285 - DNA, 1086 bp, Homo Sapiens
caggaagggctggacttccctgagtacgatggtgtggaccgtgtgatcaatgtcaatgcaaagaactacaagaatgtgttcaagaagtatgaggtgctggcactcctctaccatgaaccccccgaggatgacaaggcctcacaaagacaatttgagatggaggagctgatcctggagttagcagcccaagtcctagaagacaagggtgttggcttcgggctggtagactctgagaaggatgcagctgtggccaagaaactaggcctaactgaagtggacagcatgtatgtattcaagggagatgaagtcattgagtacgatggcgagttttctgctgacaccatcgtggagtttctgcttgatgtcctagaggaccctgtggaattgattgaaggtgaacgagagctgcaggcgtttgagaatattgaggatgagatcaaactcattggctacttcaagagcaaagactcagagcattacaaagccttcgaggatgcagctgaggagtttcatccctacatccccttcttcgccaccttcgacagcaaggtggcaaagaagctgaccctgaagctgaatgagattgatttctacgaggccttcatggaagagcctgtgaccatcccagacaagcccaatagcgaagaggagattgtcaacttcgtggaggagcacaggagatcaaccctgaggaaactgaagccggagagtatgtatgagacctgggaggatgatatggatggaatccacattgtggccttcgcagaggaagctgatcctgatggtttcgagttcttagagactctcaaggctgtggcccaagataacactgaaaacccagatcttagcatcatctggattgaccctgatgacttccccctgctggtcccatactgggagaagacgtttgacatcgacttgtcagccccacaaataggagtcgtcaatgttactgatgcggatagcgtatggatggaaatggacgatgaggaggacctgccttctgctgaggagctggaggactggctggaggatgtcctggagggcgagatcaacacagaggacgatgacgatgatgatgatgac

SEQ ID NO: 5286 - DNA, 684 bp, Homo Sapiens
cagatgccaaccagttcagtgaaagatgagaccaatgacaacatcacgatatttaccaggatcttggatgggctcttggatggctacgacaacagacttcggcccgggctgggagagcgcatcactcaggtgaggaccgacatctacgtcaccagcttcggcccggtgtccgacacggaaatggagtacaccatagacgtgtttttccgacaaagctggaaagatgaaaggcttcggtttaaggggcccatgcagcgcctccctctcaacaacctccttgccagcaagatctggaccccagacacgttcttccacaacgggaagaagtccatcgctcacaacatgaccacgcccaacaagctgctgcggctggaggacgacggcaccctgctctacaccatgcgcttgaccatctctgcagagtgccccatgcagcttgaggacttcccgatggatgcgcacgcttgccctctgaaatttggcagctatgcgtaccctaattctgaagtcgtctacgtctggaccaacggctccaccaagtcggtggtggtggcggaagatggctccagactgaaccagtaccacctgatggggcagacggtgggcactgagaacatcagcaccagcacaggcgaatacacaatcatgacagctcacttccacctgaaaaggaagattggctac

SEQ ID NO: 5287 - DNA, 744 bp, Homo Sapiens
atggagagagccagtctgatccagaaggccaagctggcagagcaggccgaacgctatgaggacatggcagccttcatgaaaggcgccgtggagaagggcgaggagctctcctgcgaagagcgaaacctgctctcagtagcctataagaacgtggtgggcggccagagggctgcctggagggtgctgtccagtattgagcagaaaagcaacgaggagggctcggaggagaaggggcccgaggtgcgtgagtaccgggagaaggtggagactgagctccagggcgtgtgcgacaccgtgctgggcctgctggacagccacctcatcaaggaggccggggacgccgagagccgggtcttctacctgaagatgaagggtgactactaccgctacctggccgaggtggccaccggtgacgacaagaagcgcatcattgactcagcccggtcagcctaccaggaggccatggacatcagcaagaaggagatgccgcccaccaaccccatccgcctgggcctggccctgaacttttccgtcttccactacgagatcgccaacagccccgaggaggccatctctctggccaagaccactttcgacgaggccatggctgatctgcacaccctcagcgaggactcctacaaagacagcaccctcatcatgcagctgctgcgagacaacctgacactgtggacggccgacaacgccggggaagaggggggcgaggctccccaggagccccagagc

SEQ ID NO: 5288 - DNA, 627 bp, Homo Sapiens
tcagaggctgagcaccgtctatttgagcggctgtttgaagattacaatgagatcatccggcctgtagccaacgtgtctgacccagtcatcatccatttcgaggtgtccatgtctcagctggtgaaggtggatgaagtaaaccagatcatggagaccaacctgtggctcaagcaaatctggaatgactacaagctgaagtggaacccctctgactatggtggggcagagttcatgcgtgtccctgcacagaagatctggaagccagacattgtgctgtataacaatgctgttggggatttccaggtggacgacaagaccaaagccttactcaagtacactggggaggtgacttggatacctccggccatctttaagagctcctgtaaaatcgacgtgacctacttcccgtttgattaccaaaactgtaccatgaagttcggttcctggtcctacgataaggcgaaaatcgatctggtcctgatcggctcttccatgaacctcaaggactattgggagagcggcgagtgggccatcatcaaagccccaggctacaaacacgacatcaagtacaactgctgcgaggagatctaccccgacatcacatactcgctgtacatccggcgcctg

SEQ ID NO: 5289 - DNA, 1767 bp, Homo Sapiens
atggcatcagagatccacatgacaggcccaatgtgcctcattgagaacactaatgggcgactgatggcgaatccagaagctctgaagatcctttctgccattacacagcctatggtggtggtggcaattgtgggcctctaccgcacaggcaaatcctacctgatgaacaagctggctggaaagaaaaagggcttctctctgggctccacggtgcagtctcacactaaaggaatctggatgtggtgtgtgccccaccccaagaagccaggccacatcctagttctgctggacaccgagggtctgggagatgtagagaagggtgacaaccagaatgactcctggatcttcgccctggccgtcctcctgagcagcaccttcgtgtacaatagcataggaaccatcaaccagcaggctatggaccaactgtactatgtgacagagctgacacatagaatccgatcaaaatcctcacctgatgagaatgagaatgaggttgaggattcagctgactttgtgagcttcttcccagactttgtgtggacactgagagatttctccctggacttggaagcagatggacaacccctcacaccagatgagtacctgacatactccctgaagctgaagaaaggtaccagtcaaaaagatgaaacttttaacctgcccagactctgtatccggaaattcttcccaaagaaaaaatgctttgtctttgatcggcccgttcaccgcaggaagcttgcccagctcgagaaactacaagatgaagagctggaccccgaatttgtgcaacaagtagcagacttctgttcctacatctttagtaattccaaaactaaaactctttcaggaggcatccaggtcaacgggcctcgtctagagagcctggtgctgacctacgtcaatgccatcagcagtggggatctgccgtgcatggagaacgcagtcctggccttggcccagatagagaactcagctgcagtgcaaaaggctattgcccactatgaacagcagatgggccagaaggtgcagctgcccacagaaagcctccaggagctgctggacctgcacagggacagtgagagagaggccattgaagtcttcatcaggagttccttcaaagatgtggaccatctatttcaaaaggagttagcggcccagctagaaaaaaagcgggatgacttttgtaaacagaatcaggaagcatcatcagatcgttgctcaggtttacttcaggtcattttcagtcctctagaagaagaagtgaaggcgggaatttattcgaaaccagggggctatcgtctctttgttcagaagctacaagacctgaagaaaaagtactatgaggaaccgaggaaggggatacaggctgaagagattctgcagacatacttgaaatccaaggagtctatgactgatgcaattctccagacagaccagactctcacagaaaaagaaaaggagattgaagtggaacgtgtgaaagctgagtctgcacaggcttcagcaaaaatgttgcaggaaatgcaaagaaagaatgagcagatgatggaacagaaggagaggagttatcaggaacacttgaaacaactgactgagaagatggagaacgacagggtccagttgctgaaagagcaagagaggaccctcgctcttaaacttcaggaacaggagcaactactaaaagagggatttcaaaaagaaagcagaataatgaaaaatgagatacaggatctccagacgaaaatgagacgacgaaaggcatgt

SEQ ID NO: 5290 - DNA, 1488 bp, Homo Sapiens
gccccgcagccccccaacatcctgctcctgctcatggacgacatgggatggggtgacctcggggtgtatggagagccctccagagagaccccgaatttggaccggatggctgcagaagggctgcttttcccaaacttctattctgccaaccctctgtgctcgccatcgagggcggcactgctcacaggacggctacccatccgcaatggcttctacaccaccaacgcccatgccagaaacgcctacacaccgcaggagattgtgggcggcatcccagactcggagcagctcctgccggagcttctgaagaaggccggctacgtcagcaagattgtcggcaagtggcatctgggtcacaggccccagttccaccccctgaagcacggatttgatgagtggtttggatcccccaactgccactttggaccttatgacaacaaggccaggcccaacatccctgtgtacagggactgggagatggttggcagatattatgaagaatttcctattaatctgaagacgggggaagccaacctcacccagatctacctgcaggaagccctggacttcattaagagacaggcacggcaccacccctttttcctctactgggctgtcgacgccacgcacgcacccgtctatgcctccaaacccttcttgggcaccagtcagcgagggcggtatggagacgccgtccgggagattgatgacagcattgggaagatactggagctcctccaagacctgcacgtcgcggacaacaccttcgtcttcttcacgtcggacaacggcgctgccctcatttccgcccccgaacaaggtggcagcaacggcccctttctgtgtgggaagcagaccacgtttgaaggagggatgagggagcctgccctcgcatggtggccagggcacgtcactgcaggccaggtgagccaccagctgggcagcatcatggacctcttcaccaccagcctggcccttgcgggcctgacgccgcccagcgacagggccattgatggcctcaacctcctccccaccctcctgcagggccggctgatggacaggcctatcttctattaccgtggcgacacgctgatggcggccaccctcgggcagcacaaggctcacttctggacctggaccaactcctgggagaacttcagacagggcattgatttctgccctgggcagaacgtttcaggggtcacaactcacaatctggaagaccacacgaagctgcccctgatcttccacctgggacgggacccaggggagaggttccccctcagctttgccagcgccgagtaccaggaggccctcagcaggatcacctcggtcgtccagcagcaccaggaggccttggtccccgcgcagccccagctcaacgtgtgcaactgggcggtcatgaactgggcacctccgggctgtgaaaagttagggaagtgtctgacacctccagaatccattcccaagaagtgcctctggtcccac

SEQ ID NO: 5291 - DNA, 357 bp, Homo Sapiens
caggatggcatgtaccagcgattcctgcggcaacacgtgcaccctgaggagacaggtggcagtgatcgctactgcaacttgatgatgcaaagacggaagatgactttgtatcactgcaagcgcttcaacaccttcatccatgaagatatctggaacattcgtagtatctgcagcaccaccaatatccaatgcaagaacggcaagatgaactgccatgagggtgtagtgaaggtcacagattgcagggacacaggaagttccagggcacccaactgcagatatcgggccatagcgagcactagacgtgttgtcattgcctgtgagggtaacccacaggtgcctgtgcactttgacggt

SEQ ID NO: 5292 - DNA, 894 bp, Homo Sapiens
aatgactgtcctcacaaaaaatcagctactttgctgccatccttcacggtgacacccacggttacagagagcactggaacaaccagccacaggactaccaagagccacaaaaccaccactcacaggacaaccaccacaggcaccaccagccacggacccacgactgccactcacaaccccaccaccaccagccatggaaacgtcacagttcatccaacaagcaatagcactgccaccagccagggaccctcaactgccactcacagtcctgccaccactagtcatggaaatgccacggttcatccaacaagcaacagcactgccaccagcccaggattcaccagttctgcccacccagaaccacctccaccctctccgagtcctagcccaacctccaaggagaccattggagactacacgtggaccaatggttcccagccctgtgtccacctccaagcccagattcagattcgagtcatgtacacaacccagggtggaggagaggcctggggcatctctgtactgaaccccaacaaaaccaaggtccagggaagctgtgagggtgcccatccccacctgcttctctcattcccctatggacacctcagctttggattcatgcaggacctccagcagaaggttgtctacctgagctacatggcggtggagtacaatgtgtccttcccccacgcagcacagtggacattctcggctcagaatgcatcccttcgagatctccaagcacccctggggcagagcttcagttgcagcaactcgagcatcattctttcaccagctgtccacctcgacctgctctccctgaggctccaggctgctcagctgccccacacaggggtctttgggcaaagtttctcctgccccagtgaccggtcc

SEQ ID NO: 5293 - DNA, 744 bp, Homo Sapiens
caaggggaatcaagacgacaagaacccggggactttgtgaagcaggacattggcgggctgtctcctaagcatgccccagatattcctgatgacagcactgacaacatcactatcttcaccagaatcttggatcgtcttctggacggctatgacaaccggctgcgacctgggcttggagatgcagtgactgaagtgaagactgacatctacgtgaccagttttggccctgtgtcagacactgacatggagtacactattgatgtattttttcggcagacatggcatgatgaaagactgaaatttgatggccccatgaagatccttccactgaacaatctcctggctagtaagatctggacaccggacaccttcttccacaatggcaagaaatcagtggctcataacatgaccacgcccaacaagctgctcagattggtggacaacggaaccctcccctatacaatgaggttaacaattcatgctgagtgtcccatgcatttggaagattttcccatggatgtgcatgcctgcccactgaagtttggaagctatgcctatacaacagctgaagtggtttattcttggactctcggaaagaacaaatccgtggaagtggcacaggatggttctcgcttgaaccagtatgaccttttgggccatgttgttgggacagagataatccggtctagtacaggagaatatgtcgtcatgacaacccacttccatctcaagcgaaaaattggc

SEQ ID NO: 5294 - DNA, 543 bp, Homo Sapiens
aagacagagacaattacaacagagaagcagtcacagcctaccttattcacatcatcaatgtcacaggtattggctaattctcaaaacacaacagggaatcctttgggtcaaccaacacaattcagcgacactttttctggacaatcaatatcacctgccaaagtcactgctggacaaccaacaccagctgtctatacctcttctgaaaaaccagaagcacatacttctgctggacaaccacttgcctacaacaccaaacaaccaacaccaatagccaacacctcctcccagcaagccgtgttcacctctgccagacaactaccatctgcccgtacttctaccacacaaccaccaaagtcatttgtctatacttttactcaacaatcatcatctgtccagatcccttctagaaaacaaataactgttcataatccatccacacaaccaacatcaactgtcaaaaattcacctaggagtacaccaggatttatcttagatactaccagtaacaaacaaaccccacaaaaaaacaattataattca

SEQ ID NO: 5295 - DNA, 606 bp, Homo Sapiens
ccgccgccgctgctgcttctgcttgcgctgttgccgctgctgcccgcgcctggcgctgccgccgcccccgccccgcggcccccggagctgcagtcggcttccgcggggcccagcgtgagtctctacctgagcgaggacgaggtgcgccggctgatcggtcttgatgcagaactttattatgtgagaaatgaccttattagtcactacgctctatcctttagtctgttagtacccagtgagacaaatttcctgcacttcacctggcatgcgaagtccaaggttgaatataagctgggattccaagtggacaatgttttggcaatggatatgccccaggtcaacatttctgttcagggggaagttccacgcactttatcagtgtttcgggtagagctttcctgtactggcaaagtagattctgaagttatgatactaatgcagctcaacttgacagtaaattcttcaaaaaattttaccgtcttaaattttaaacgaaggaaaatgtgctacaaaaaacttgaagaagtaaaaacttcagccttggacaaaaacactagcagaactatttatgatcctgtacatgcagctccaaccacttctacgcgt

SEQ ID NO: 5296 - DNA, 1521 bp, Homo Sapiens
gacccggccagcaagagccggagctgcggcgaggtccgccagatctacggagccaagggcttcagcctgagcgacgtgccccaggcggagatctcgggtgagcacctgcggatctgtccccagggctacacctgctgcaccagcgagatggaggagaacctggccaaccgcagccatgccgagctggagaccgcgctccgggacagcagccgcgtcctgcaggccatgcttgccacccagctgcgcagcttcgatgaccacttccagcacctgctgaacgactcggagcggacgctgcaggccaccttccccggcgccttcggagagctgtacacgcagaacgcgagggccttccgggacctgtactcagagctgcgcctgtactaccgcggtgccaacctgcacctggaggagacgctggccgagttctgggcccgcctgctcgagcgcctcttcaagcagctgcacccccagctgctgctgcctgatgactacctggactgcctgggcaagcaggccgaggcgctgcggcccttcggggaggccccgagagagctgcgcctgcgggccacccgtgccttcgtggctgctcgctcctttgtgcagggcctgggcgtggccagcgacgtggtccggaaagtggctcaggtccccctgggcccggagtgctcgagagctgtcatgaagctggtctactgtgctcactgcctgggagtccccggcgccaggccctgccctgactattgccgaaatgtgctcaagggctgccttgccaaccaggccgacctggacgccgagtggaggaacctcctggactccatggtgctcatcaccgacaagttctggggtacatcgggtgtggagagtgtcatcggcagcgtgcacacgtggctggcggaggccatcaacgccctccaggacaacagggacacgctcacggccaaggtcatccagggctgcgggaaccccaaggtcaacccccagggccctgggcctgaggagaagcggcgccggggcaagctggccccgcgggagaggccaccttcaggcacgctggagaagctggtctctgaagccaaggcccagctccgcgacgtccaggacttctggatcagcctcccagggacactgtgcagtgagaagatggccctgagcactgccagtgatgaccgctgctggaacgggatggccagaggccggtacctccccgaggtcatgggtgacggcctggccaaccagatcaacaaccccgaggtggaggtggacatcaccaagccggacatgaccatccggcagcagatcatgcagctgaagatcatgaccaaccggctgcgcagcgcctacaacggcaacgacgtggacttccaggacgccagtgacgacggcagcggctcgggcagcggtgatggctgtctggatgacctctgcggccggaaggtcagcaggaagagctccagctcccggacgcccttgacccatgccctcccaggcctgtcagagcaggaaggacagaagacctcg

SEQ ID NO: 5297 - DNA, 1389 bp, Homo Sapiens
gggaaggtgctggtggtgcccactgatggcagccactggctcagcatgcgggaggccttgcgggacctccatgcgagaggccaccaggtggtggtcctcaccctggaggtgaatatgtacatcaaagaagagaactttttcaccctgacaacgtatgccatttcatggacccaggacgaatttgatcgccttttgctgggtcacactcaatcgttctttgaaacagaacatcttctgatgaaattttctagaagaatggcaattatgaacaatatgtctttgatcatacataggtcttgtgtggagctactgcataatgaggccctgatcaggcacctgcatgctacttcctttgatgtggttctaacagacccctttcacctctgcgcggcggtgctggctaagtacctgtcgattcctgctgtgtttttcttgaggaacattccatgtgatttagactttaagggcacacagtgtccaaacccttcctcctatattcctagattactaacgaccaattcagaccacatgacattcctgcaaagggtcaagaacatgctctaccctctggccctgtcctacctttgccatgctgtttctgctccttatgcaagccttgcctctgagctttttcagagagaggtgtcagtggtggatcttgtcagccatgcatctgtgtggctgttccgaggggactttgtgatggattaccccaggccgatcatgcccaacatggtcttcattgggggcatcaactgtgccaacgggaagccactatctcaggaatttgaagcctacattaatgcttctggagaacatggaattgtggttttctctttgggatcaatggtctcagaaattccagagaagaaagctatggcaattgctgatgctttgggcaaaatccctcagacagtcctgtggcggtacactggaacccgaccatcgaatcttgcgaacaacacgatacttgttaagtggctaccccaaaacgatctgcttggtcacccgatgacccgtgcctttatcacccatgctggttcccatggtgtttatgaaagcatatgcaatggcgttcccatggtgatgatgcccttgtttggtgatcagatggacaatgcaaagcgcatggagactaagggagctggagtgaccctgaatgttctggaaatgacttctgaagatttagaaaatgctctaaaagcagtcatcaatgacaaaagttacaaggagaacatcatgcgcctctccagccttcacaaggaccgcccggtggagccgctggacctggccgtgttctgggtggagtttgtgatgaggcacaagggcgcgccacacctgcgccccgcagcccacgacctcacctggtaccagtaccattccttggac

SEQ ID NO: 5298 - DNA, 336 bp, Homo Sapiens
gaaagctggcgttcgtttttcaaggaggctctccaaggggttggggacatgggcagagcctattgggacataatgatatccaatcaccaaaattcaaacagatatctctatgctcggggaaactatgatgctgcccaaagaggacctgggggtgtctgggctgctaaactcatcagccgttccagggtctatcttcagggattaatagactactatttatttggaaacagcagcactgtattggaggactcgaagtccaacgagaaagctgaggaatggggccggagtggcaaagaccccgaccgcttcagacctgacggcctgcctaagaaatac

SEQ ID NO: 5299 - DNA, 564 bp, Homo Sapiens
tgcacatgctcgcccagccacccccaggacgccttctgcaactccgacatcgtgatccgggccaaggtggtggggaagaagctggtaaaggaggggcccttcggcacgctggtctacaccatcaagcagatgaagatgtaccgaggcttcaccaagatgccccatgtgcagtacatccatacggaagcttccgagagtctctgtggccttaagctggaggtcaacaagtaccagtacctgctgacaggtcgcgtctatgatggcaagatgtacacggggctgtgcaacttcgtggagaggtgggaccagctcaccctctcccagcgcaaggggctgaactatcggtatcacctgggttgtaactgcaagatcaagtcctgctactacctgccttgctttgtgacttccaagaacgagtgtctctggaccgacatgctctccaatttcggttaccctggctaccagtccaaacactacgcctgcatccggcagaagggcggctactgcagctggtaccgaggatgggcccccccggataaaagcatcatcaatgccacagacccc

SEQ ID NO: 5300 - DNA, 1086 bp, Homo Sapiens
tacaaactggtctgctactacaccagctggtcccagtaccgggaaggcgatgggagctgcttcccagatgcccttgaccgcttcctctgtacccacatcatctacagctttgccaatataagcaacgatcacatcgacacctgggagtggaatgatgtgacgctctacggcatgctcaacacactcaagaacaggaaccccaacctgaagactctcttgtctgtcggaggatggaactttgggtctcaaagattttccaagatagcctccaacacccagagtcgccggactttcatcaagtcagtaccgccatttctgcgcacccatggctttgatgggctggaccttgcctggctctaccctggacggagagacaaacagcattttaccaccctaatcaaggaaatgaaggccgaatttataaaggaagcccagccagggaaaaagcagctcctgctcagcgcagcactgtctgcggggaaggtcaccattgacagcagctatgacattgccaagatatcccaacacctggatttcattagcatcatgacctacgattttcatggagcctggcgtgggaccacaggccatcacagtcccctgttccgaggtcaggaggatgcaagtcctgacagattcagcaacactgactatgctgtggggtacatgttgaggctgggggctcctgccagtaagctggtgatgggcatccccaccttcgggaggagcttcactctggcttcttctgagactggtgttggagccccaatctcaggaccgggaattccaggccggttcaccaaggaggcagggacccttgcctactatgagatctgtgacttcctccgcggagccacagtccatagaatcctcggccagcaggtcccctatgccaccaagggcaaccagtgggtaggatacgacgaccaggaaagcgtcaaaagcaaggtgcagtacctgaaggacaggcagctggcgggcgccatggtatgggccctggacctggatgacttccagggctccttctgcggccaggatctgcgcttccctctcaccaatgccatcaaggatgcactcgctgcaacg

SEQ ID NO: 5301 - DNA, 1674 bp, Homo Sapiens
tctcgacaccaggccccatgtggcccccaggcctttgcccacgctgctgttgccgccgactccaaggtctgctcggatattggacgagccatcctccagcagcagggctcacccgtggatgccaccatcgcggctctggtctgcaccagcgtcgtcaaccctcagagcatgggcctgggcggaggggtcatcttcaccatctacaatgtgacaacagggaaggtggaggtcatcaatgcccgggagacggtgccggccagccacgccccgagcctgctggaccagtgtgcacaggctctgccactgggcacaggggcccagtggatcggggtgcccggggagctccgtggctatgccgaggcccaccgccgccatggccgcctgccctgggcgcagctgttccagcccaccatcgcgctgctccgaggggggcatgtggtggcccctgtcctcagccgtttcctgcacaacagcatcctgcggccttccttgcaggcgtcaaccctgcgccagctcttcttcaacgggacagaacccctgaggcctcaggacccactcccatggcctgcactggccaccaccctggagaccgtggccacagagggcgtggaggtcttctacacggggaggctgggccagatgctggtggaggacattgccaaggaagggagccagctgacgctgcaggacctggccaagttccagcccgaggtggtggatgccctggaggtgcccctgggggactataccctgtactcaccaccgccgcctgcagggggtgccattctcagctttatcctcaacgtgctaagagggttcaacttctcaacagagtctatggccaggcctgaagggagggtgaacgtgtaccaccaccttgtagagacgctcaagtttgccaaggggcagaggtggaggctgggggaccctcgaagccacccgaagctccagaatgcctcccgggacctgctgggggagaccctggcccagctcatccgccaacagatcgatggccggggggaccaccagctcagccactacagcttggccgaggcctggggccacgggacaggcacgtcccatgtgtctgtgctgggggaggatggcagcgccgtggctgccaccagcaccatcaacacaccctttggagcgatggtgtattcaccacggacaggcatcatcctcaacaacgagctcctggacttatgcgagcgatgcccccggggttccggcaccaccccctcacctgcagtgagtggagacagggtgggtggagctcccggaaggtgctggcccccagttccaggcgagcgttccccatcctccatggtgccctccatcttgatcaacaaagcccaggggtcgaagctagtgattggcggggctggcggggagctcatcatctctgctgtggcccaggccatcatgagcaagctgtggcttggctttgacctgagagcggccattgcagcccccatcctgcatgtcaacagcaagggctgtgtggagtacgagcccaacttcagccaggaggtgcagaggggactccaagaccgtggccagaaccagacccagaggcccttcttcctgaacgtggtccaggctgtgtcccaggagggggcctgtgtgtacgccgtctcggacctgaggaagagtggggaggccgcaggctac

SEQ ID NO: 5302 - DNA, 309 bp, Homo Sapiens
tccgggccccggggggtccaggctctgctgtgtgcgtgcaccagctgcctccaggccaactacacgtgtgagacagatggggcctgcatggtttccattttcaatctggatgggatggagcaccatgtgcgcacctgcatccccaaagtggagctggtccctgccgggaagcccttctactgcctgagctcggaggacctgcgcaacacccactgctgctacactgactactgcaacaggatcgacttgagggtgcccagtggtcacctcaaggagcctgagcacccgtccatgtggggcccggtggag

SEQ ID NO: 5303 - DNA, 1197 bp, Homo Sapiens
cagaaccctgccagccccccggaggagggctccccagaccccgacagcacaggggcgctggtggaggaggaggatcctttcttcaaagtccccgtgaacaagctggcagcggctgtctccaacttcggctatgacctgtaccgggtgcgatccagcacgagccccacgaccaacgtgctcctgtctcctctcagtgtggccacggccctctcggccctctcgctgggagcggagcagcgaacagaatccatcattcaccgggctctctactatgacttgatcagcagcccagacatccatggtacctataaggagctccttgacacggtcaccgccccccagaagaacctcaagagtgcctcccggatcgtctttgagaagaagctgcgcataaaatccagctttgtggcacctctggaaaagtcatatgggaccaggcccagagtcctgacgggcaaccctcgcttggacctgcaagagatcaacaactgggtgcaggcgcagatgaaagggaagctcgccaggtccacaaaggaaattcccgatgagatcagcattctccttctcggtgtggcgcacttcaaggggcagtgggtaacaaagtttgactccagaaagacttccctcgaggatttctacttggatgaagagaggaccgtgagggtccccatgatgtcggaccctaaggctgttttacgctatggcttggattcagatctcagctgcaagattgcccagctgcccttgaccggaagcatgagtatcatcttcttcctgcccctgaaagtgacccagaatttgaccttgatagaggagagcctcacctccgagttcattcatgacatagaccgagaactgaagaccgtgcaggcggtcctcactgtccccaagctgaagctgagttacgaaggcgaagtcaccaagtccctgcaggagatgaagctgcaatccttgtttgattcaccagactttagcaagatcacaggcaaacccatcaagctgactcaggtggaacaccgggctggctttgagtggaacgaggatggggcgggaaccacccccagcccagggctgcagcctgcccacctcaccttcccgctggactatcaccttaaccagcctttcatcttcgtactgagggacacagacacaggggcccttctcttcattggcaagattctggaccccaggggcccc

SEQ ID NO: 5304 - DNA, 756 bp, Homo Sapiens
gaagcaatgttctgtgattttccaaaaataaaccatggaattctatatgatgaagaaaaatataagccattttcccaagttcctacaggggaagttttctattactcctgtgaatataattttgtgtctccttcaaaatccttttggactcgcataacgtgcgcagaagaaggatggtcaccaacaccaaagtgtctcagactgtgtttctttccttttgtggaaaatggtcattctgaatcttcaggacaaacacatctggaaggtgatactgtacaaattatttgcaacacaggatacagacttcaaaacaatgagaacaacatttcatgtgtagaacggggctggtccactcctcccaaatgcaggtccactatttctgcagaaaaatgtgggccccctccacctattgacaatggagacattacttcattcctgttgtcagtatatgctccaggttcatcagttgagtaccagtgccagaacttgtatcaacttgagggtaacaatcaaataacatgtagaaacggacaatggtcagaaccaccaaaatgcttagatccatgtgtaatatcacaagaaattatggaaaaatataacataaaattaaagtggacaaaccaacaaaagctttattcaagaacaggtgacatagttgaatttgtttgtaaatctggatatcatccaacaaaatctcattcatttcgagcaatgtgtcagaatgggaaactggtatatcccagttgtgaagaaaaa

SEQ ID NO: 5305 - DNA, 291 bp, Homo Sapiens
gaccctgtgaagccgtctcggggcccgctggtgacctgcacgtgtgagagcccacattgcaaggggcctacctgccggggggcctggtgcacagtagtgctggtgcgggaggaggggaggcacccccaggaacatcggggctgcgggaacttgcacagggagctctgcagggggcgccccaccgagttcgtcaaccactactgctgcgacagccacctctgcaaccacaacgtgtccctggtgctggaggccacccaacctccttcggagcagccgggaacagatggccag

SEQ ID NO: 5306 - DNA, 420 bp, Homo Sapiens
atggatgtattcatgaaaggactttcaaaggccaaggagggagttgtggctgctgctgagaaaaccaaacagggtgtggcagaagcagcaggaaagacaaaagagggtgttctctatgtaggctccaaaaccaaggagggagtggtgcatggtgtggcaacagtggctgagaagaccaaagagcaagtgacaaatgttggaggagcagtggtgacgggtgtgacagcagtagcccagaagacagtggagggagcagggagcattgcagcagccactggctttgtcaaaaaggaccagttgggcaagaatgaagaaggagccccacaggaaggaattctggaagatatgcctgtggatcctgacaatgaggcttatgaaatgccttctgaggaagggtatcaagactacgaacctgaagcc

SEQ ID NO: 5307 - DNA, 1365 bp, Homo Sapiens
ctgaatttcagagcacctcctgttattccaaatgtgcctttcctctgggcctggaatgccccaagtgaattttgtcttggaaaatttgatgagccactagatatgagcctcttctctttcataggaagcccccgaataaacgccaccgggcaaggtgttacaatattttatgttgatagacttggctactatccttacatagattcaatcacaggagtaactgtgaatggaggaatcccccagaagatttccttacaagaccatctggacaaagctaagaaagacattacattttatatgccagtagacaatttgggaatggctgttattgactgggaagaatggagacccacttgggcaagaaactggaaacctaaagatgtttacaagaataggtctattgaattggttcagcaacaaaatgtacaacttagtctcacagaggccactgagaaagcaaaacaagaatttgaaaaagcagggaaggatttcctggtagagactataaaattgggaaaattacttcggccaaatcacttgtggggttattatctttttccggattgttacaaccatcactataagaaacccggttacaatggaagttgcttcaatgtagaaataaaaagaaatgatgatctcagctggttgtggaatgaaagcactgctctttacccatccatttatttgaacactcagcagtctcctgtagctgctacactctatgtgcgcaatcgagttcgggaagccatcagagtttccaaaatacctgatgcaaaaagtccacttccggtttttgcatatacccgcatagtttttactgatcaagttttgaaattcctttctcaagatgaacttgtgtatacatttggcgaaactgttgctctgggtgcttctggaattgtaatatggggaaccctcagtataatgcgaagtatgaaatcttgcttgctcctagacaattacatggagactatactgaatccttacataatcaacgtcacactagcagccaaaatgtgtagccaagtgctttgccaggagcaaggagtgtgtataaggaaaaactggaattcaagtgactatcttcacctcaacccagataattttgctattcaacttgagaaaggtggaaagttcacagtacgtggaaaaccgacacttgaagacctggagcaattttctgaaaaattttattgcagctgttatagcaccttgagttgtaaggagaaagctgatgtaaaagacactgatgctgttgatgtgtgtattgctgatggtgtctgtatagatgcttttctaaaacctcccatggagacagaagaacctcaaattttctacaatgcttcaccctccacactatct

SEQ ID NO: 5308 - DNA, 1128 bp, Homo Sapiens
gggaaactgacagctttggatcctgaaacaaacatgaatgtgagtgaaattatctcttactggggattccctagtgaggaatacctagttgagacagaagatggatatattctgtgccttaaccgaattcctcatgggaggaagaaccattctgacaaaggtcccaaaccagttgtcttcctgcaacatggcttgctggcagattctagtaactgggtcacaaaccttgccaacagcagcctgggcttcattcttgctgatgctggttttgacgtgtggatgggcaacagcagaggaaatacctggtctcggaaacataagacactctcagtttctcaggatgaattctgggctttcagttatgatgagatggcaaaatatgacctaccagcttccattaacttcattctgaataaaactggccaagaacaagtgtattatgtgggtcattctcaaggcaccactataggttttatagcattttcacagatccctgagctggctaaaaggattaaaatgttttttgccctgggtcctgtggcttccgtcgccttctgtactagccctatggccaaattaggacgattaccagatcatctcattaaggacttatttggagacaaagaatttcttccccagagtgcgtttttgaagtggctgggtacccacgtttgcactcatgtcatactgaaggagctctgtggaaatctctgttttcttctgtgtggatttaatgagagaaatttaaatatgtctagagtggatgtatatacaacacattctcctgctggaacttctgtgcaaaacatgttacactggagccaggctgttaaattccaaaagtttcaagcctttgactggggaagcagtgccaagaattattttcattacaaccagagttatcctcccacatacaatgtgaaggacatgcttgtgccgactgcagtctggagcgggggtcacgactggcttgcagatgtctacgacgtcaatatcttactgactcagatcaccaacttggtgttccatgagagcattccggaatgggagcatcttgacttcatttggggcctggatgccccttggaggctttataataaaattattaatctaatgaggaaatatcag

SEQ ID NO: 5309 - DNA, 1593 bp, Homo Sapiens
cagaccgccccgcaagtactcaggatcggagggatttttgaaacagtggaaaatgagcctgttaatgttgaagaattagctttcaagtttgcagtcaccagcattaacagaaaccgaaccctgatgcctaacaccacattaacctatgacatccagagaattaacctttttgatagttttgaagcctcgcggagagcatgtgaccagctggctcttggtgtggctgctctctttggcccttcccatagctcctccgtcagtgctgtgcagtctatttgcaatgctctcgaagttccacacatacagacccgctggaaacacccctcggtggacaacaaagatttgttttacatcaacctttacccagattatgcagctatcagcagggcgatcctggatctggtcctctattacaactggaaaacagtgacagtggtgtatgaagacagcacaggtctaattcgtctacaagagctcatcaaagctccctccagatataatattaaaatcaaaatccgccagctgccctctgggaataaagatgccaagcctttactcaaggagatgaagaaaggcaaggagttctatgtgatatttgattgttcacatgaaacagccgctgaaatccttaagcagattctgttcatgggcatgatgaccgagtactatcactactttttcacaaccctggacttatttgctttggatctggaactctataggtacagtggcgtaaacatgaccgggtttcggctgcttaacattgacaaccctcacgtgtcatccatcattgagaagtggtccatggagagactgcaggccccacccaggcccgagactggccttttggatggcatgatgacaactgaagcggctctgatgtacgatgctgtgtacatggtggccattgcctcgcaccgggcatcccagctgaccgtcagctccctgcagtgccatagacataagccatggcgcctcggacccagatttatgaacctgatcaaagaggcccggtgggatggcttgactgggcatatcacctttaataaaaccaatggcttgaggaaggattttgatctggacattattagtctcaaagaggaaggaactgaaaagattgggatttggaattccaacagtgggcttaacatgacggacagcaacaaagacaagtccagcaatatcactgattcattggccaacagaacactcattgtcaccaccattctggaagaaccctatgttatgtacaggaaatctgataagcctctatatggaaatgacagatttgaaggatattgcctagacctgttgaaagaattgtcaaacatcctgggtttcatttatgatgttaaactagttcccgatggcaaatatggggcccagaatgacaaaggggagtggaacgggatggttaaagaactcatagatcacagggctgacctggcagtggctcctcttaccatcacctacgtgcgggagaaagtcattgacttctccaaacccttcatgaccctaggcatcagcattctctaccggaagcccaatggtaccaatccaggcgttttctccttcctcaaccccctgtctcca

SEQ ID NO: 5310 - DNA, 354 bp, Homo Sapiens
ggcttgctggacctaaaatcaatgatcgagaaggtgacagggaagaacgccctgacaaactacggcttctacggctgttactgcggctggggcggccgaggaacccccaaggatggcaccgattggtgctgttgggcgcatgaccactgctatgggcggctggaggagaagggctgcaacattcgcacacagtcctacaaatacagattcgcgtggggcgtggtcacctgcgagcccgggcccttctgccatgtgaacctctgtgcctgtgaccggaagctcgtctactgcctcaagagaaacctacggagctacaacccacagtaccaatactttcccaacatcctctgctcc

SEQ ID NO: 5311 - DNA, 1095 bp, Homo Sapiens
gggcccgtatggaggaaacattatatcacctacagaatcaataattacacacctgacatgaaccgtgaggatgttgactacgcaatccggaaagctttccaagtatggagtaatgttacccccttgaaattcagcaagattaacacaggcatggctgacattttggtggtttttgcccgtggagctcatggagacttccatgcttttgatggcaaaggtggaatcctagcccatgcttttggacctggatctggcattggaggggatgcacatttcgatgaggacgaattctggactacacattcaggaggcacaaacttgttcctcactgctgttcacgagattggccattccttaggtcttggccattctagtgatccaaaggccgtaatgttccccacctacaaatatgttgacatcaacacatttcgcctctctgctgatgacatacgtggcattcagtccctgtatggagacccaaaagagaaccaacgcttgccaaatcctgacaattcagaaccagctctctgtgaccccaatttgagttttgatgctgtcactaccgtgggaaataagatctttttcttcaaagacaggttcttctggctgaaggtttctgagagaccaaagaccagtgttaatttaatttcttccttatggccaaccttgccatctggcattgaagctgcttatgaaattgaagccagaaatcaagtttttctttttaaagatgacaaatactggttaattagcaatttaagaccagagccaaattatcccaagagcatacattcttttggttttcctaactttgtgaaaaaaattgatgcagctgtttttaacccacgtttttataggacctacttctttgtagataaccagtattggaggtatgatgaaaggagacagatgatggaccctggttatcccaaactgattaccaagaacttccaaggaatcgggcctaaaattgatgcagtcttctactctaaaaacaaatactactatttcttccaaggatctaaccaatttgaatatgacttcctactccaacgtatcaccaaaacactgaaaagcaatagctggtttggttgt

SEQ ID NO: 5312 - DNA, 693 bp, Homo Sapiens
attgtcaacggggagaatgcagtgttgggctcctggccctggcaggtgtccctgcaggacagcagcggcttccacttctgcggtggttctctcatcagccagtcctgggtggtcactgctgcccactgcaatgtcagccctggccgccattttgttgtcctgggcgagtatgaccgatcatcaaacgcagagcccttgcaggttctgtccgtctctcgggccattacacaccctagctggaactctaccaccatgaacaatgacgtgacgctgctgaagctcgcctcgccagcccagtacacaacacgcatctcgccagtttgcctggcatcctcaaacgaggctctgactgaaggcctcacgtgtgtcaccaccggctggggtcgcctcagtggcgtgggcaatgtgacaccagcacatctgcagcaggtggctttgcccctggtcactgtgaatcagtgccggcagtactggggctcaagtatcactgactccatgatctgtgcaggtggcgcaggtgcctcctcgtgccagggtgactccggaggccctcttgtctgccagaagggaaacacatgggtgcttattggtattgtctcctggggcaccaaaaactgcaatgtgcgcgcacctgctgtgtatactcgagttagcaagttcagcacctggatcaaccaggtcatagcctacaac

SEQ ID NO: 5313 - DNA, 438 bp, Homo Sapiens
gtgcccatccaaaaagtccaagatgacaccaaaaccctcatcaagacaattgtcaccaggatcaatgacatttcacacacgcagtcagtctcctccaaacagaaagtcaccggtttggacttcattcctgggctccaccccatcctgaccttatccaagatggaccagacactggcagtctaccaacagatcctcaccagtatgccttccagaaacgtgatccaaatatccaacgacctggagaacctccgggatcttcttcacgtgctggccttctctaagagctgccacttgccctgggccagtggcctggagaccttggacagcctggggggtgtcctggaagcttcaggctactccacagaggtggtggccctgagcaggctgcaggggtctctgcaggacatgctgtggcagctggacctcagccctgggtgc

SEQ ID NO: 5314 - DNA, 957 bp, Homo Sapiens
attataggagcacagcctctctgcagccaactggcaggactttctcaaggacagaagaaactgtgccacttgtatcaggaccacatgcagtacatcggagaaggcgcgaagacaggcatcaaagaatgccagtatcaattccgacatcgaaggtggaactgcagcactgtggataacacctctgtttttggcagggtgatgcagataggcagccgcgagacggccttcacatacgcggtgagcgcagcaggggtggtgaacgccatgagccgggcgtgccgcgagggcgagctgtccacctgcggctgcagccgcgccgcgcgccccaaggacctgccgcgggactggctctggggcggctgcggcgacaacatcgactatggctaccgctttgccaaggagttcgtggacgcccgcgagcgggagcgcatccacgccaagggctcctacgagagtgctcgcatcctcatgaacctgcacaacaacgaggccggccgcaggacggtgtacaacctggctgatgtggcctgcaagtgccatggggtgtccggctcatgtagcctgaagacatgctggctgcagctggcagacttccgcaaggtgggtgatgccctgaaggagaagtacgacagcgcggcggccatgcggctcaacagccggggcaagttggtacaggtcaacagccgcttcaactcgcccaccacacaagacctggtctacatcgaccccagccctgactactgcgtgcgcaatgagagcaccggctcgctgggcacgcagggccgcctgtgcaacaagacgtcggagggcatggatggctgcgagctcatgtgctgcggccgtggctacgaccagttcaagaccgtgcagacggagcgctgccactgcaagttccactggtgctgctacgtcaagtgcaagaagtgcacggagatcgtggaccagtttgtgtgcaag

SEQ ID NO: 5315 - DNA, 504 bp, Homo Sapiens
gcaccggaggcccaggtctccgtgcagcccaacttccagcaggacaagttcctggggcgctggttcagcgcgggcctcgcctccaactcgagctggctccgggagaagaaggcggcgttgtccatgtgcaagtctgtggtggcccctgccacggatggtggcctcaacctgacctccaccttcctcaggaaaaaccagtgtgagacccgaaccatgctgctgcagcccgcggggtccctcggctcctacagctaccggagtccccactggggcagcacctactccgtgtcagtggtggagaccgactacgaccagtacgcgctgctgtacagccagggcagcaagggccctggcgaggacttccgcatggccaccctctacagccgaacccagacccccagggctgagttaaaggagaaattcaccgccttctgcaaggcccagggcttcacagaggataccattgtcttcctgccccaaaccgataagtgcatgacggaacaa

SEQ ID NO: 5316 - DNA, 660 bp, Homo Sapiens
agtgcgcgggccaggacggacctgctcaatgtctgcatgaacgccaagcaccacaagacacagcccagccccgaggacgagctgtatggccagtgcagtccctggaagaagaatgcctgctgcacggccagcaccagccaggagctgcacaaggacacctcccgcctgtacaactttaactgggatcactgtggtaagatggaacccacctgcaagcgccactttatccaggacagctgtctctatgagtgctcacccaacctggggccctggatccggcaggtcaaccagagctggcgcaaagagcgcattctgaacgtgcccctgtgcaaagaggactgtgagcgctggtgggaggactgtcgcacctcctacacctgcaaaagcaactggcacaaaggctggaattggacctcagggattaatgagtgtccggccggggccctctgcagcacctttgagtcctacttccccactccagccgccctttgtgaaggcctctggagccactccttcaaggtcagcaactatagtcgagggagcggccgctgcatccagatgtggtttgactcagcccagggcaaccccaatgaggaggtggccaagttctatgctgcggccatgaatgctggggccccgtctcgtgggattattgattcc

SEQ ID NO: 5317 - DNA, 330 bp, Homo Sapiens
cacctgccacctgaggagaagctccgagatgacaggagcctgagaagcaactcctctgtgaacctactggatgtcccttctgtctctattgtggcgctgaacaagaaatccaaacagatcggcagaaaagcagcagaaaagaaaagatcttctaagaaggaggcttcgatgaagaaagtggtgcggccccggacccccctatctgcgccctgcgtggccacccgcaacagctgcaagccgccggcacccgcctgctgcgacccgtgcgcctcctgccagtgccgcttcttccgcagcgcctgctcctgccgcgtgctcagcctcaactgc

SEQ ID NO: 5318 - DNA, 1554 bp, Homo Sapiens
gccaatttccccaacaatatccagatcgggggattatttccaaaccagcagtcacaggaacatgctgcttttagatttgctttgtcgcaactcacagagcccccgaagctgctcccccagattgatattgtgaacatcagcgacagctttgagatgacctatagattctgttcccagttctccaaaggagtctatgccatctttgggttttatgaacgtaggactgtcaacatgctgacctccttttgtggggccctccacgtctgcttcattacgccgagctttcccgttgatacatccaatcagtttgtccttcagctgcgccctgaactgcaggatgccctcatcagcatcattgaccattacaagtggcagaaatttgtctacatttatgatgccgaccggggcttatccgtcctgcagaaagtcctggatacagctgctgagaagaactggcaggtgacagcagtcaacatcttgacaaccacagaggagggataccggatgctctttcaggacctggagaagaaaaaggagcggctggtggtggtggactgtgaatcagaacgcctcaatgctatcttgggccagattataaagctagagaagaatggcatcggctaccactacattcttgcaaatctgggcttcatggacattgacttaaacaaattcaaggagagtggcgccaatgtgacaggtttccagctggtgaactacacagacactattccggccaagatcatgcagcagtggaagaatagtgatgctcgagaccacacacgggtggactggaagagacccaagtacacctctgcgctcacctacgatggggtgaaggtgatggctgaggctttccagagcctgcggaggcagagaattgatatatctcgccgggggaatgctggggattgtctggctaacccagctgttccctggggccaagggatcgacatccagagagctctgcagcaggtgcgatttgaaggtttaacaggaaacgtgcagtttaatgagaaaggacgccggaccaactacacgctccacgtgattgaaatgaaacatgacggcatccgaaagattggttactggaatgaagatgataagtttgtccctgcagccaccgatgcccaagctgggggcgataattcaagtgttcagaacagaacatacatcgtcacaacaatcctagaagatccttatgtgatgctcaagaagaacgccaatcagtttgagggcaatgaccgttacgagggctactgtgtagagctggcggcagagattgccaagcacgtgggctactcctaccgtctggagattgtcagtgatggaaaatacggagcccgagaccctgacacgaaggcctggaatggcatggtgggagagctggtctatggaagagcagatgtggctgtggctcccttaactatcactttggtccgggaagaagttatagatttctccaaaccatttatgagtttggggatctccatcatgattaaaaaaccacagaaatccaagccgggtgtcttctccttccttgatcctttggct

SEQ ID NO: 5319 - DNA, 1572 bp, Homo Sapiens
ggattccccaacaccatcagcataggtggacttttcatgagaaacacagtgcaggagcacagcgctttccgctttgccgtgcagttatacaacaccaaccagaacaccaccgagaagcccttccatttgaattaccacgtagatcacttggattcctccaatagtttttccgtgacaaatgctttctgctcccagttctcgagaggggtgtatgccatctttggattctatgaccagatgtcaatgaacaccctgacctccttctgtggggccctgcacacatcctttgttacgcctagcttccccactgacgcagatgtgcagtttgtcatccagatgcgcccagccttgaagggcgctattctgagtcttctgggtcattacaagtgggagaagtttgtgtacctctatgacacagaacgaggattttccatcctccaagcgattatggaagcagcagtgcaaaacaactggcaagtaacagcaaggtctgtgggaaacataaaggacgtccaagaattcaggcgcatcattgaagaaatggacaggaggcaggaaaagcgatacttgattgactgcgaagtcgaaaggattaacacaattttggaacaggttgtgatcctagggaaacactcaagaggttatcactacatgctcgctaacctgggttttactgatattttactggaaagagtcatgcatgggggagccaacattacaggtttccagattgtcaacaatgaaaaccctatggttcagcagttcatacagcgctgggtgaggctggatgaaagggaattccctgaagccaagaatgcaccactaaagtatacatctgcattgacacacgacgcaatactggtcatagcagaagctttccgctacctgaggaggcagcgagtagatgtgtcccggagaggaagtgctggagactgcttagcaaatcctgctgtgccctggagtcaaggaattgatattgagagagctctgaaaatggtgcaagtacaaggaatgactggaaatattcaatttgacacttatggacgtaggacaaattataccatcgatgtgtatgaaatgaaagtcagtggctctcgaaaagctggctactggaacgagtatgaaaggtttgtgcctttctcagatcagcaaatcagcaatgacagtgcatcctcagagaatcggaccatagtagtgactaccattctggaatcaccatatgtaatgtacaagaagaaccatgagcaactggaaggaaatgaacgatatgaaggctattgtgtagacctagcctatgaaatagccaaacatgtaaggatcaaatacaaattgtccatcgttggtgacgggaaatatggtgcaagggatccagagactaaaatatggaacggcatggttggggaacttgtctatgggagagctgatatagctgttgctccactcactataacattggtccgtgaagaagtcatagatttttcaaagccattcatgagcctgggcatctccatcatgataaagaagcctcagaaatcaaaaccaggcgtattctcatttctggatcccctggct

SEQ ID NO: 5320 - DNA, 2247 bp, Homo Sapiens
ctgacaccagcggaagataatagtctgtctcaaaagaagaaggtcactgtagaagatctcttcagtgaagacttcaaaattcatgaccccgaggctaagtggataagtgatacagaattcatctacagagaacagaaaggaacagtgagactgtggaatgttgaaacaaatacttctactgtcttaatagaaggcaaaaaaattgaatcattaagagccatcagatatgaaatatctccagatagagagtatgcacttttttcatacaatgtggaacccatatatcaacactcgtatactggatattatgtcctgagcaaaattcctcatggggatcctcaaagtctggacccaccagaagtcagcaatgcaaagcttcagtatgcaggatggggccctaaaggccaacagctgatatttatttttgaaaacaatatctactactgtgcacatgtcgggaaacaggccatccgtgtggtctccactggcaaggaaggtgtgatttacaatggcctcagtgactggctgtatgaagaggagattttgaagacacacatcgcacactggtggtctccggatggcacgagactcgcctacgccgccatcaatgattcccgtgtccccatcatggagctcccaacttacaccggctccatctaccccaccgtgaagccctaccactatcccaaggctggaagtgagaaccccagcatttccctacacgttattggcttaaatggacccacccatgatctggagatgatgccgcctgatgatccacggatgagggagtactacatcaccatggtgaagtgggccaccagcaccaaggtcgccgtgacctggctgaaccgggcgcagaacgtgtccatcctcaccctctgcgacgccaccacgggggtctgcacgaagaaacacgaggatgaaagtgaggcctggctccacagacagaatgaagaacctgtgttctccaaggatggccgaaagtttttcttcatcagagccatcccccagggaggacgagggaaattctatcacatcacggtgtcctcgtcccagcccaacagcagcaacgacaacatccagtccatcacctccggggactgggacgtgaccaagatcctagcctacgatgagaaggggaataagatctacttcctgagcacggaggacctgcctcggagacgacaactctacagtgccaacacggtgggcaacttcaacaggcagtgcctctcctgtgacctggttgagaactgcacctacttcagcgcttccttcagccatagcatggacttcttcctgctcaagtgcgaaggtcctggtgttcctatggtgacggtgcacaacacaacagataagaaaaaaatgtttgacctagaaacaaatgaacatgtcaagaaggccataaatgaccgacagatgcctaaagtggaatacagggacattgagattgatgattacaacctgcccatgcagatactgaagccagcaaccttcaccgacaccacccactaccctctgctcctggtggtggatggcaccccgggcagccagagtgtagctgagaagttcgaggtgagctgggagacggtgatggtgagcagccacggcgcggtggtggtaaagtgtgaaggccgtggcagcggcttccgagggaccaagctcctgcacgaagtgaggcggcggctgggcttgctggaggagaaggaccagatggaggccgtgcggacgatgctgaaggagcagtacattgacaggacgcgcgtggccgtgtttgggaaggattacggtggctacctgagcacctacatcctcccagcaaagggagaaaatcaaggccagacattcacctgcggctctgctctctctccaataacagacttcaaactctatgcctctgcgttttccgagaggtacttgggcctccatggacttgacaacagagcatacgagatgaccaaggtagcccatcgagtctccgcgctggaagaacagcagttcctgatcattcatcccactgccgatgaaaaaattcatttccagcacacagcagaactcattacacaactaattaggggaaaggctaattacagcttacagatttacccggacgaaagccattactttaccagctccagcctcaaacagcatctgtaccggtccatcatcaacttcttcgtggaatgcttcaggatccaggacaaactgctgacagtcacagcgaaagaggacgaggaggaggac

SEQ ID NO: 5321 - DNA, 1353 bp, Homo Sapiens
aagaactattcggttctctacttccaacagaaggttgatcattttggatttaatactgtgaaaacttttaatcagcggtacctagtagctgataaatactggaagaaaaatggtggatcaatacttttctacactggtaatgaaggggacattatctggttttgtaataacacggggttcatgtgggatgtggctgaggaactgaaagctatgttggtgtttgctgaacatcgatactatggagagtctctcccctttggtgacaactcattcaaggattccagacacttgaatttcctgacatcagaacaagctctggctgattttgcagagttaatcaaacacttgaaaagaacaatcccaggagctgaaaatcaacctgtcattgccataggaggctcctatggtggcatgcttgccgcctggtttaggatgaaatatcctcatatggtagttggagctcttgcagcttctgcccctatctggcagtttgaggatttagtaccttgtggtgtatttatgaagatcgtaactacagattttaggaaaagcggtccacattgttcagagagcatccacaggtcctgggatgccattaatcgactctcaaatactggcagtggtttgcagtggcttactggagcccttcacttatgcagcccattaacttctcaggacatccaacatttgaaagactggatctctgaaacctgggtgaatctggcaatggtggactatccttatgcctctaactttttacagcctttgcctgcttggcctatcaaggtagtgtgccagtatttgaaaaatcccaatgtatctgattcactgctgctgcagaatattttccaagctctgaatgtatattacaattattcgggccaggtgaaatgcctgaatatttcagagacagcaactagcagtctgggaacactgggttggagctatcaggcctgcacagaagtagtcatgcccttttgtactaatggtgtcgatgacatgtttgaacctcactcatggaacttaaaggaactttctgatgactgttttcaacagtggggtgtgagaccaaggccctcctggatcactactatgtatggaggcaaaaacattagttcacacacaaacattgttttcagcaatggtgaactagacccctggtcaggaggtggagtaactaaggatatcacagacactctggttgcagtcaccatctcagagggggcccaccacttagatctccgcaccaagaatgccttggatcctatgtctgtgctgttagcccgctccttggaagttagacatatgaagaattggatcagagatttctatgacagtgcgggaaagcagcac

SEQ ID NO: 5322 - DNA, 2043 bp, Homo Sapiens
cagtaccagacaagatccccctctgtgtgcctgagcgaagcttgtgtctcagtgaccagctccatcttgagctccatggaccccacagtggacccctgccatgacttcttcagctacgcctgtgggggctggatcaaggccaacccagtccctgatggccactcacgctgggggaccttcagcaacctctgggaacacaaccaagcaatcatcaagcacctcctcgaaaactccacggccagcgtgagcgaggcagagagaaaggcgcaagtatactaccgtgcgtgcatgaacgagaccaggatcgaggagctcagggccaaacctctaatggagttgattgagaggctcgggggctggaacatcacaggtccctgggccaaggacaacttccaggacaccctgcaggtggtcaccgcccactaccgcacctcacccttcttctctgtctatgtcagtgccgattccaagaactccaacagcaacgtgatccaggtggaccagtctggcctgggcttgccctcgagagactattacctgaacaaaactgaaaacgagaaggtgctgaccggatatctgaactacatggtccagctggggaagctgctgggcggcggggacgaggaggccatccggccccagatgcagcagatcttggactttgagacggcactggccaacatcaccatcccacaggagaagcgccgtgatgaggagctcatctaccacaaagtgacggcagccgagctgcagaccttggcacccgccatcaactggttgccttttctcaacaccatcttctaccccgtggagatcaatgaatccgagcctattgtggtctatgacaaggaataccttgagcagatctccactctcatcaacaccaccgacagatgcctgctcaacaactacatgatctggaacctggtgcggaaaacaagctccttccttgaccagcgctttcaggacgccgatgagaagttcatggaagtcatgtacgggaccaagaagacctgtcttcctcgctggaagttttgcgtgagtgacacagaaaacaacctgggctttgcgttgggccccatgtttgtcaaagcaaccttcgccgaggacagcaagagcatagccaccgagatcatcctggagattaagaaggcatttgaggaaagcctgagcaccctgaagtggatggatgaggaaacccgaaaatcagccaaggaaaaggccgatgccatctacaacatgataggataccccaacttcatcatggatcccaaggagctggacaaagtgtttaatgactacactgcagttccagacctctactttgaaaatgccatgcggtttttcaacttctcatggagggtcactgccgatcagctcaggaaagcccccaacagagatcagtggagcatgaccccgcccatggtgaacgcctactactcgcccaccaagaatgagattgtgtttccggccgggatcctgcaggcaccattctacacacgctcctcacccaaggccttaaactttggtggcataggtgtcgtcgtgggccatgagctgactcatgcttttgatgatcaaggacgggagtatgacaaggacgggaacctccggccatggtggaagaactcatccgtggaggccttcaagcgtcagaccgagtgcatggtagagcagtacagcaactacagcgtgaacggggagccggtgaacgggcggcacaccctgggggagaacatcgccgacaacgggggtctcaaggcggcctatcgggcttaccagaactgggtgaagaagaacggggctgagcactcgctccccaccctgggcctcaccaataaccagctcttcttcctgggctttgcacaggtctggtgctccgtccgcacacctgagagctcccacgaaggcctcatcaccgatccccacagcccctctcgcttccgggtcatcggctccctctccaattccaaggagttctcagaacacttccgctgcccacctggctcacccatgaacccgcctcacaagtgcgaagtctgg

SEQ ID NO: 5323 - DNA, 273 bp, Homo Sapiens
agcatcaagcctggtgtcacccagaaagtgggtgaaattgcgaggacaggcagcacccctgaagtcagtacggtggatgccatgttagatctcatcaggaatatgttccctgagaatcttgtccaggcctgttttcagcagtacaaaactaagcgtgaagaagtgaagcctcccagcgatccagagatgaacatgacagaagagtccttcacagctgtcatgacaactgcaatttccaagaacaaaacaaaggaatacaaaattgttggcatg

SEQ ID NO: 5324 - DNA, 231 bp, Homo Sapiens
aagccaggatccggtgcgcagacccttcagtccagcgacctggggctggaggactcggggcctcctcctgtccccaaagagacggtggactctttcctcgacctggccagaaacctgtttccctccaatcttgtggttgcagctttccgtacgtatgcaaccgattataaagtcgtgacccagaacagcagctctggaaatgtaacccatgaaaagatccccataggcact

SEQ ID NO: 5325 - DNA, 642 bp, Homo Sapiens
ttgccgttaagatttgactggagggacaagcaggttgtgacacaagtgagaaaccagcagatgtgtggaggatgctgggccttcagcgtggtgggggcagtggaatctgcttatgcaataaaggggaagcccctggaagacctaagtgtccagcaggtcattgactgttcgtataataattatggctgcaatggaggctctactctcaatgctttgaactggttaaacaagatgcaagtaaaactggtgaaagattcagaatatccttttaaagcacaaaatggtctgtgccattacttttctggttcacattctggattttcaatcaaaggttattctgcatatgacttcagtgaccaagaagatgaaatggcaaaagcacttcttacctttggccctttggtagtcatagtagatgcagtgagctggcaagattatctgggaggcattatacagcatcactgctctagtggagaagcaaatcatgcagttctcataactgggtttgataaaacaggaagcactccatattggattgtgcggaattcctggggaagttcttggggagtagatggttatgcccatgtcaaaatgggaagtaatgtttgtggtattgcagattccgtttcttctatatttgtg

SEQ ID NO: 5326 - DNA, 645 bp, Homo Sapiens
gccccagactctgtcgactatcgaaagaaaggatatgttactcctgtcaaaaatcagggtcagtgtggttcctgttgggcttttagctctgtgggtgccctggagggccaactcaagaagaaaactggcaaactcttaaatctgagtccccagaacctagtggattgtgtgtctgagaatgatggctgtggagggggctacatgaccaatgccttccaatatgtgcagaagaaccggggtattgactctgaagatgcctacccatatgtgggacaggaagagagttgtatgtacaacccaacaggcaaggcagctaaatgcagagggtacagagagatccccgaggggaatgagaaagccctgaagagggcagtggcccgagtgggacctgtctctgtggccattgatgcaagcctgacctccttccagttttacagcaaaggtgtgtattatgatgaaagctgcaatagcgataatctgaaccatgcggttttggcagtgggatatggaatccagaagggaaacaagcactggataattaaaaacagctggggagaaaactggggaaacaaaggatatatcctcatggctcgaaataagaacaacgcctgtggcattgccaacctggccagcttccccaagatg

SEQ ID NO: 5327 - DNA, 1506 bp, Homo Sapiens
gcccacaccggggaggagagcgtggctgaccatcacgaggctgaatattatgtggctgccgtgtatgagcatccatccatcctgagtctgaaccctctggctctcatcagccgccaagaggccttggagctcatgaaccagaaccttgacatctatgaacagcaagtgatgactgcagcccaaaaggatgtacagattatagtgtttccagaagatggcattcatggattcaactttacaagaacatccatttatccatttttggacttcatgccgtctccccaggtggtcaggtggaacccatgcctggagcctcaccgcttcaatgacacagaggtgctccagcgcctgagttgtatggccatcaggggagatatgttcttggtggccaatcttgggacaaaggagccttgtcatagcagtgacccaaggtgcccaaaagatgggagataccagttcaacacaaatgtcgtgttcagcaataatggaacccttgttgaccgctaccgtaaacacaacctctactttgaggcagcattcgatgttcctcttaaagtggatctcatcacctttgataccccctttgctggcaggtttggcatcttcacatgctttgatatattgttctttgaccctgccatcagagtcctcagagactacaaggtgaagcatgttgtgtacccaactgcctggatgaaccagctcccactcttggcagcaattgagattcagaaagcttttgctgttgcctttggcatcaacgttctggcagctaatgtccaccacccagttctggggatgacaggaagtggcatacacacccctctggagtccttttggtaccatgacatggaaaatcccaaaagtcaccttataattgcccaggtggccaaaaatccagtgggtctcattggtgcagagaatgcaacaggtgaaacggacccatcccatagtaagtttttaaaaattttgtcaggcgatccgtactgtgagaaggatgctcaggaagtccactgtgatgaggccaccaagtggaacgtgaatgctcctcccacatttcactctgagatgatgtatgacaatttcaccctggtccctgtctggggaaaggaaggctatctccacgtctgttccaatggcctctgctgttatttactttacgagaggcccaccttatccaaagagctgtatgccctgggggtctttgatgggcttcacacagtacatggcacttactacatccaagtgtgtgccctggtcaggtgtgggggtcttggcttcgacacctgtggacaggaaatcacagaggccacggggatatttgagtttcacctgtggggcaacttcagtacttcctatatctttcctttgtttctgacctcagggatgaccctagaagtccctgaccagcttggctgggagaatgaccactatttcctgaggaaaagtaggctgtcctctgggctggtgacggcggctctctatgggcgcttgtatgagagggac

SEQ ID NO: 5328 - DNA, 1473 bp, Homo Sapiens
atgaatcctgcggcagaagccgagttcaacatcctcctggccaccgactcctacaaggttactcactataaacaatatccacccaacacaagcaaagtttattcctactttgaatgccgtgaaaagaagacagaaaactccaaattaaggaaggtgaaatatgaggaaacagtattttatgggttgcagtacattcttaataagtacttaaaaggtaaagtagtaaccaaagagaaaatccaggaagccaaagatgtctacaaagaacatttccaagatgatgtctttaatgaaaagggatggaactacattcttgagaagtatgatgggcatcttccaatagaaataaaagctgttcctgagggctttgtcattcccagaggaaatgttctcttcacggtggaaaacacagatccagagtgttactggcttacaaattggattgagactattcttgttcagtcctggtatccaatcacagtggccacaaattctagagagcagaagaaaatattggccaaatatttgttagaaacttctggtaacttagatggtctggaatacaagttacatgattttggctacagaggagtctcttcccaagagactgctggcataggagcatctgctcacttggttaacttcaaaggaacagatacagtagcaggacttgctctaattaaaaaatattatggaacgaaagatcctgttccaggctattctgttccagcagcagaacacagtaccataacagcttgggggaaagaccatgaaaaagatgcttttgaacatattgtaacacagttttcatcagtgcctgtatctgtggtcagcgatagctatgacatttataatgcgtgtgagaaaatatggggtgaagatctaagacatttaatagtatcgagaagtacacaggcaccactaataatcagacctgattctggaaaccctcttgacactgtgttaaaggttttggagattttaggtaagaagtttcctgttactgagaactcaaagggttacaagttgctgccaccttatcttagagttattcaaggggatggagtagatattaataccttacaagagattgtagaaggcatgaaacaaaaaatgtggagtattgaaaatattgccttcggttctggtggaggtttgctacagaagttgacaagagatctcttgaattgttccttcaagtgtagctatgttgtaactaatggccttgggattaacgtcttcaaggacccagttgctgatcccaacaaaaggtccaaaaagggccgattatctttacataggacgccagcagggaattttgttacactggaggaaggaaaaggagaccttgaggaatatggtcaggatcttctccatactgtcttcaagaatggcaaggtgacaaaaagctattcatttgatgaaataagaaaaaatgcacagctgaatattgaactggaagcagcacatcat

SEQ ID NO: 5329 - DNA, 1734 bp, Homo Sapiens
ctgcccacacaacctcgggatatagagaacttcaatagtactcaaaaatttatagaagataatattgaatacatcaccatcattgcatttgctcagtatgttcaggaagcaacctttgaagaaatggaaaagctggtgaaagacatggtagaatacaaagacagatgtatggctgacaagacgctcccagagtgttcaaaattacctaataatgttttacaggaaaaaatatgtgctatggaggggctgccacaaaagcataatttctcacactgctgcagtaaggttgatgctcaaagaagactctgtttcttctataacaagaaatctgatgtgggatttctgcctcctttccctaccctggatcccgaagagaaatgccaggcttatgaaagtaacagagaatcccttttaaatcactttttatatgaagttgccagaaggaacccatttgtcttcgcccctacacttctaactgttgctgttcattttgaggaggtggccaaatcatgttgtgaagaacaaaacaaagtcaactgccttcaaacaagggcaatacctgtcacacaatatttaaaagcattttcttcttatcaaaaacatgtctgtggggcacttttgaaatttggaaccaaagttgtacactttatatatattgcgatactcagtcaaaaattccccaagattgaatttaaggagcttatttctcttgtagaagatgtttcttccaactatgatggatgctgtgaaggggatgttgtgcagtgcatccgtgacacgagcaaggttatgaaccatatttgttcaaaacaagattctatctccagcaaaatcaaagagtgctgtgaaaagaaaataccagagcgcggccagtgcataattaactcaaacaaagatgatagaccaaaggatttatctctaagagaaggaaaatttactgacagtgaaaatgtgtgtcaagaacgagatgctgacccagacaccttctttgcgaagtttacttttgaatactcaaggagacatccagacctgtctataccagagcttttaagaattgttcaaatatacaaagatctcctgagaaattgctgcaacacagaaaaccctccaggttgttaccgttacgcggaagacaaattcaatgagacaactgagaaaagcctcaagatggtacaacaagaatgtaaacatttccagaatttggggaaggatggtttgaaataccattacctcatcaggctcacgaagatagctccccaactctccactgaagaactggtgtctcttggcgagaaaatggtgacagctttcactacttgctgtacgctaagtgaagagtttgcctgtgttgataatttggcagatttagtttttggagagttatgtggagtaaatgaaaatcgaactatcaaccctgctgtggaccactgctgtaaaacaaactttgccttcagaaggccctgctttgagagtttgaaagctgataaaacatatgtgcctccacctttctctcaagatttatttacctttcacgcagacatgtgtcaatctcagaatgaggagcttcagaggaagacagacaggtttcttgtcaacttagtgaagctgaagcatgaactcacagatgaagagctgcagtctttgtttacaaatttcgcaaatgtagtggataagtgctgcaaagcagagagtcctgaagtctgctttaatgaagagagtccaaaaattggcaac

SEQ ID NO: 5330 - DNA, 642 bp, Homo Sapiens
catgtggagacccgggcccacgccgaggagcggctcctgaagaaactcttctccggttacaacaagtggtcccgacccgtggccaacatctcggacgtggtcctcgtccgcttcggcctgtccatcgctcagctcattgacgtggatgagaagaaccagatgatgaccacgaacgtatgggtgaagcaggagtggcacgactacaagctgcgctgggacccagctgactatgagaatgtcacctccatccgcatcccctccgagctcatctggcggccggacatcgtcctctacaacaatgctgacggggacttcgcggtcacccacctgaccaaggcccacctgttccatgacgggcgggtgcagtggactcccccggccatttacaagagctcctgcagcatcgacgtcaccttcttccccttcgaccagcagaactgcaccatgaaattcggctcctggacctacgacaaggccaagatcgacctggtgaacatgcacagccgcgtggaccagctggacttctgggagagtggcgagtgggtcatcgtggacgccgtgggcacctacaacaccaggaagtacgagtgctgcgccgagatctacccggacatcacctatgccttcgtcatccggcggctg

SEQ ID NO: 5331 - DNA, 1104 bp, Homo Sapiens
tacaatgttttccctcgaactcttaaatggtccaaaatgaatttaacctacagaattgtgaattacacccctgatatgactcattctgaagtcgaaaaggcattcaaaaaagccttcaaagtttggtccgatgtaactcctctgaattttaccagacttcacgatggcattgctgacatcatgatctcttttggaattaaggagcatggcgacttctacccatttgatgggccctctggcctgctggctcatgcttttcctcctgggccaaattatggaggagatgcccattttgatgatgatgaaacctggacaagtagttccaaaggctacaacttgtttcttgttgctgcgcatgagttcggccactccttaggtcttgaccactccaaggaccctggagcactcatgtttcctatctacacctacaccggcaaaagccactttatgcttcctgatgacgatgtacaagggatccagtctctctatggtccaggagatgaagaccccaaccctaaacatccaaaaacgccagacaaatgtgacccttccttatcccttgatgccattaccagtctccgaggagaaacaatgatctttaaagacagattcttctggcgcctgcatcctcagcaggttgatgcggagctgtttttaacgaaatcattttggccagaacttcccaaccgtattgatgctgcatatgagcacccttctcatgacctcatcttcatcttcagaggtagaaaattttgggctcttaatggttatgacattctggaaggttatcccaaaaaaatatctgaactgggtcttccaaaagaagttaagaagataagtgcagctgttcactttgaggatacaggcaagactctcctgttctcaggaaaccaggtctggagatatgatgatactaaccatattatggataaagactatccgagactaatagaagaagacttcccaggaattggtgataaagtagatgctgtctatgagaaaaatggttatatctattttttcaacggacccatacagtttgaatacagcatctggagtaaccgtattgttcgcgtcatgccagcaaattccattttgtggtgt

SEQ ID NO: 5332 - DNA, 189 bp, Homo Sapiens
gacaccatccccacgtacctacagtggatgtcctacatctcctatgtcaggtatgggttcgaaggggtcatcctctccatctatggcttagaccgggaagatctgcactgtgacatcgacgagacgtgccacttccagaagtcggaggccatcctgcgggagctggacgtggaaaatgccaagctgtac

SEQ ID NO: 5333 - DNA, 606 bp, Homo Sapiens
gataaaactcttccagtcttccccaaaggaaacgaagtccaaattaaagttttgaatataggaaacaataccatgaatatatctcttcctggagagatggtgacacttggcccaatgtctcaaacaaatgcatttatgacttttgatgtaaacaaactgacaaggataaacatttcttctcctggatcaccagtcactgccgtaactgacgacttcaagcagggccaacgccacacgcttctagtgtgggcccccaatcactaccaggtggtaaaggatggtcttaaccagaagccagaaaaaggggaaaatggaatcagatttgtaaatacttttaacgagctcatcaccatcacaatgagtgggaaagtttatgcaaacatcagcagctacaatgccagcacataccagttttttccttctggcataaaaggcttcacaataagctcaacagagattccgccacaatgtcaacctaatttcaatactttctaccttgaatttggtagtgcttatacctatatagtccaaaggaagaatgacagctgccctgaagtgaaggtgtttgaagatatttcagccaacacagttaacatggctctgcaa

SEQ ID NO: 5334 - DNA, 654 bp, Homo Sapiens
aggaggagccgaaacaccaccaggcccgctctgctgaggctgtcggattaccttttgaccaactacaggaagggtgtgcgccccgtgagggactggaggaagccaaccaccgtatccattgacgtcattgtctatgccatcctcaacgtggatgagaagaatcaggtgctgaccacctacatctggtaccggcagtactggactgatgagtttctccagtggaaccctgaggactttgacaacatcaccaagttgtccatccccacggacagcatctgggtcccggacattctcatcaatgagttcgtggatgtggggaagtctccaaatatcccgtacgtgtatattcggcatcaaggcgaagttcagaactacaagccccttcaggtggtgactgcctgtagcctcgacatctacaacttccccttcgatgtccagaactgctcgctgaccttcaccagttggctgcacaccatccaggacatcaacatctctttgtggcgcttgccagaaaaggtgaaatccgacaggagtgtcttcatgaaccagggagagtgggagttgctgggggtgctgccctactttcgggagttcagcatggaaagcagtaactactatgcagaaatgaagttctatgtggtcatccgccggcgg

SEQ ID NO: 5335 - DNA, 171 bp, Homo Sapiens
atggctgaagagggtgtgccggcgcccctgcctccagaggacgcccctaacgccgcatccctggcgcccacccctgtgtcccccgtcctcgagccctttaatctgacttcggagccctcggactacgctctggacctcagcactttcctccagcaacacccggccgccttc

SEQ ID NO: 5336 - DNA, 510 bp, Homo Sapiens
aggcctaaacttcctcttagatacccagaacgccttcagaatccatcagagagcagtgagcctataccattagaatcaagagaggaatacatgaatggtatgaacaggcagagaaacattctgagagaaaaacagactgatgaaatcaaggatactaggaatgagtctactcagaactgtgttgtggcagagcctgagaagatggaatccagcatcagttcatcgagtgaggaaatgtctctcagtaagtgtgcggaacagttttgtagactgaacgaatacaaccaacttcagctgcaagctgtccatgcccaggagcaaattcgcagaatgaatgaaaacagccatgtccaagtgcctttccagcagctcaaccaacttgctgcctacccctatgctgtttggtactatccacaaatcatgcagtatgttcctttcccaccgttttccgacatctccaatcccactgctcatgaaaattatgaaaaaaataacgtcatgctacagtgg

SEQ ID NO: 5337 - DNA, 657 bp, Homo Sapiens
agtgtcaatgaccctagtaatatgtcgctggttaaagagacggtggatagactcctgaaaggctatgacattcgtctgagaccagattttggaggtccccccgtggctgtggggatgaacattgacattgccagcatcgatatggtttctgaagtcaatatggattataccttgacaatgtactttcaacaagcctggagagataagaggctgtcctataatgtaatacctttaaacttgactctggacaacagagtggcagaccagctctgggtgcctgatacctatttcctgaacgataagaagtcatttgtgcacggagtgactgttaagaaccgcatgattcgcctgcatcctgatggcaccgtcctttatggactcagaatcacaaccacagctgcctgcatgatggacctaaggaggtacccactggatgaacaaaactgcaccttggaaattgagagctatggatacacaactgatgacattgagttttactggcgtggcgatgataatgcagtaacaggagtaacgaaaattgaacttccacagttctctattgtagattacaaacttatcaccaagaaggttgttttttccacaggttcctatcccaggttatccctcagctttaagcttaagagaaacattggctac

SEQ ID NO: 5338 - DNA, 408 bp, Homo Sapiens
atgtccaacgtcccccacaagtcctcgctgcccgagggcatccgccctggcacggtgctgagaattcgcggcttggttcctcccaatgccagcaggttccatgtaaacctgctgtgcggggaggagcagggctccgatgccgccctgcatttcaacccccggctggacacgtcggaggtggtcttcaacagcaaggagcaaggctcctggggccgcgaggagcgcgggccgggcgttcctttccagcgcgggcagcccttcgaggtgctcatcatcgcgtcagacgacggcttcaaggccgtggttggggacgcccagtaccaccacttccgccaccgcctgccgctggcgcgcgtgcgcctggtggaggtgggcggggacgtgcagctggactccgtgaggatcttc

SEQ ID NO: 5339 - DNA, 1248 bp, Homo Sapiens
ggggcccaggacagcccggcgcccggtagccgcttcgtgtgcacggcactgcccccagaggcggtgcacgccggctgcccgctgcccgcgatgcccatgcagggcggcgcgcagagtcccgaggaggagctgagggccgcggtgctgcagctgcgcgagaccgtcgtgcagcagaaggagacgctgggcgcgcagcgcgaggccatccgcgagctcacgggcaagctagcgcgctgcgaggggctggcgggcggcaaggcgcgcggcgcgggggccacgggcaaggacactatgggcgacctgccgcgggaccccggccacgtcgtggagcagctcagccgctcgctgcagaccctcaaggaccgcctggagagcctcgagcaccagctcagagcaaacgtgtccaatgctgggctgcccggcgacttccgcgaggtgctccagcagcggctgggggagctggagaggcagcttctgcgcaaggtggcagagctggaggacgagaagtccctgctgcacaatgagacctcggctcaccggcagaagaccgagagcaccctgaacgcgctgctgcagagggtcaccgagctggagcgaggcaatagcgcctttaagtcaccagatgcgttcaaggtgtccctcccactccgcacaaactacctatacggcaagatcaagaagacgctgcctgagctgtacgccttcaccatctgcctgtggctgcggtccagcgcctcaccaggcattggcacccccttctcctatgcggtgccagggcaggccaacgagatcgtgctgatcgagtggggcaacaaccccatcgagctgctcatcaacgacaaggttgcgcagctgcccctgtttgtcagtgacggcaagtggcaccacatctgtgtcacctggacgacacgggatggcatgtgggaggcattccaggacggagagaagctgggcactggggagaacctggccccctggcaccccatcaagcccgggggcgtgctgatccttggacaagagcaggacaccgtggggggtaggtttgatgccactcaggcatttgtcggggagctcagccagttcaacatatgggaccgcgtccttcgcgcacaagaaattgtcaacatcgccaactgctccacaaacatgccgggcaacatcatcccgtgggtggacaataacgtcgatgtgttcggaggggcctccaagtggcccgtggagacgtgtgaggagcgtctccttgacttg

SEQ ID NO: 5340 - DNA, 213 bp, Homo Sapiens
gtcaagtcctttaccaccacgctgccctgggccacatgtggccacacctggaacactcccgactgcgtggagatcttccgccatgaagactgtgccaatgccagcctggccaacctcacctgtgaccagcttgctgaccgccggtcccctgtcatcgagttctgggagaacaaagtcttgaggctgtctgggggactggaggtgccaggggcc

SEQ ID NO: 5341 - DNA, 915 bp, Homo Sapiens
agtggtaacttcaattttggggcctaccataccctggaagagatttcccaagaaatggataacctcgtggctgagcaccctggtctagtgagcaaagtgaatattggctcttcttttgagaaccggcctatgaacgtgctcaagttcagcaccggaggagacaagccagctatctggctggatgctgggatccatgctcgagagtgggttacacaagctacggcactttggacagcaaataagattgtttctgattatggaaaggacccatccatcacttccattctggacgccctggatatcttcctcctgccagtcacaaaccctgatggatacgtgttctctcaaaccaaaaatcgtatgtggcggaagacccggtccaaggtatctggaagcctctgtgttggtgtggatcctaaccggaactgggatgcaggttttggaggacctggagccagcagcaacccttgctctgattcataccacggacccagtgccaactctgaagttgaagtgaaatccatagtggacttcatcaagagtcatggaaaagtcaaggccttcattaccctccacagctattcccagcttctgatgttcccctatgggtacaaatgtaccaagttagatgactttgatgagctgagtgaagtggcccaaaaggctgcccaatctctgagaagcctgcatggcaccaagtacaaagtgggaccaatctgctctgtcatctaccaagccagtggaggaagcattgactggtcctatgattatggcatcaagtactcatttgcctttgaactgagagacacagggcgctacggcttcctcttgccagcccgtcagatcctgcccacagccgaggagacctggcttggcttgaaggcaatcatggagcatgtgcgagaccacccctat

SEQ ID NO: 5342 - DNA, 633 bp, Homo Sapiens
gcaaatattttgccagatatcgaaaatgaagatttcatcaaagactgcgttcgaatccataacaagttccgatcagaggtgaaaccaacagccagtgatatgctatacatgacttgggacccagcactagcccaaattgcaaaagcatgggccagcaattgccagttttcacataatacacggctgaagccaccccacaagctgcacccaaacttcacttcactgggagagaacatctggactgggtctgtgcccattttttctgtgtcttccgccatcacaaactggtatgacgaaatccaggactatgacttcaagactcggatatgcaaaaaagtctgtggccactacactcaggttgtttgggcagatagttacaaagttggctgcgcagttcaattttgccctaaagtttctggctttgacgctctttccaatggagcacattttatatgcaactacggaccaggagggaattacccaacttggccatataagagaggagccacctgcagtgcctgccccaataatgacaagtgtttggacaatctctgtgttaaccgacagcgagaccaagtcaaacgttactactctgttgtatatccaggctggcccatatatccacgtaacaga

SEQ ID NO: 5343 - DNA, 219 bp, Homo Sapiens
gcctgggctctcttctacctgttcagctccttcacttctgagctgccctggacgacctgcaacaacttttggaacacagagcattgcacggactttctgaaccactcaggagccggcacagtgaccccatttgagaattttacctcacctgtcatggaattctgggagagacgagttctgggcatcacctcgggcatccatgacctgggctccctgcgc

SEQ ID NO: 5344 - DNA, 222 bp, Homo Sapiens
gcatgggccattttttacctgagcaactgcttcactactgagctaccctgggctacctgtgggcatgagtggaacacagagaattgtgtggagttccagaaactgaatgtgagcaactacagccatgtgtctctgcagaatgccacctcccctgtcatggagttttgggagcaccgggtcctggccatctctgacgggatcgagcacatcgggaaccttcgc

SEQ ID NO: 5345 - DNA, 231 bp, Homo Sapiens
tcgtccatgacgcacgtgctgccctgggcctactgcaataacccctggaacacgcatgactgcgccggtgtactggacgcctccaacctcaccaatggctctcggccagccgccttgcccagcaacctctcccacctgctcaaccacagcctccagaggaccagccccagcgaggagtactggaggctgtacgtgctgaagctgtcagatgacattgggaactttggggag

SEQ ID NO: 5346 - DNA, 738 bp, Homo Sapiens
aaggaaaagtcttcaaagaaagggaaggggaaaaagaagcagtatctatgcccatctcagcagtcagcagaggaccttgcccgagtacctgccaactccactagcaatatcttgaacaggttattggtcagttatgatcccaggataagaccaaacttcaaaggcattcctgttgatgtagtagtcaacatttttattaacagttttggatccattcaagaaacaacaatggactatagagttaacatcttcctgagacaaaaatggaatgaccccaggctgaagctccccagtgattttaggggttcagatgcactgacagtggatccaacaatgtacaagtgtttatggaaacctgatttattttttgcaaatgaaaaaagtgccaattttcatgatgtgacccaggaaaacatcctcctctttatttttcgtgatggagatgtccttgtcagcatgaggttatctattactctttcatgccctttggacttgacattgtttcccatggatacacaacgttgcaagatgcaactggagagctttggttacacaactgatgatttacgatttatctggcagtcaggagatcctgtgcaattagaaaaaattgccttgcctcaatttgatatcaaaaaggaagatattgaatatggtaactgtacaaaatactataaaggcacgggctactacacatgcgtggaagtcatcttcaccctgaggaggcaggtcggcttt

SEQ ID NO: 5347 - DNA, 669 bp, Homo Sapiens
cagaaccaaaaggaggagaaattgtgcacagaaaatttcacccgcatcctggacagtttgctcgatggttatgacaacaggctgcgtcctggatttgggggtcctgttacagaagtgaaaactgacatatatgtcaccagctttggacctgtttctgatgttgaaatggaatacacaatggatgtgttcttcaggcagacatggattgacaaaagattaaaatatgacggccccattgaaattttgagattgaacaatatgatggtaacgaaagtgtggacccctgatactttcttcaggaatggaaagaaatctgtctcacataatatgacagctccaaataagctttttagaattatgagaaatggtactattttatacacaatgagactcaccataagtgcggagtgtcccatgagattggtggattttcccatggatggtcatgcatgccctttgaaattcgggagttatgcctatccaaagagtgagatgatctatacctggacaaaaggtcctgagaaatcagttgaagttccgaaggagtcttccagcttagttcaatatgatttgattgggcaaaccgtatcaagtgaaaccatcaaatcaattacgggtgaatatattgttatgacggtttacttccacctcagacggaagatgggttat

SEQ ID NO: 5348 - DNA, 639 bp, Homo Sapiens
gatgctgctcaggagccaacaggaaataacgcggagatctgtctcctgcccctagactacggaccctgccgggccctacttctccgttactactacgacaggtacacgcagagctgccgccagttcctgtacgggggctgcgagggcaacgccaacaatttctacacctgggaggcttgcgacgatgcttgctggaggatagaaaaagttcccaaagtttgccggctgcaagtgagtgtggacgaccagtgtgaggggtccacagaaaagtatttctttaatctaagttccatgacatgtgaaaaattcttttccggtgggtgtcaccggaaccggattgagaacaggtttccagatgaagctacttgtatgggcttctgcgcaccaaagaaaattccatcattttgctacagtccaaaagatgagggactgtgctctgccaatgtgactcgctattattttaatccaagatacagaacctgtgatgctttcacctatactggctgtggagggaatgacaataactttgttagcagggaggattgcaaacgtgcatgtgcaaaagctttgaaaaagaaaaagaagatgccaaagcttcgctttgccagtagaatccggaaaattcggaagaagcaattt

SEQ ID NO: 5349 - DNA, 1347 bp, Homo Sapiens
caacagtatttaccattgcctactcctaaagtgattggtattgatcttggcaccacctattgttctgttggggtgttttttcctggcacaggaaaagtaaaggtgattccagatgaaaatgggcatatcagcatacccagcatggtgtcttttactgacaatgatgtatatgtgggatatgaaagcgtagagctggcagattcaaatcctcaaaacacaatatatgatgccaaaagattcataggcaagatttttaccgcagaagagttggaggctgaaattggcagatacccatttaaggttttaaacaaaaatggaatggttgagttttctgtgacaagtaatgagaccatcacagtgtccccagaatatgttggctctcgactattgttgaagttaaaggaaatggcagaggcatatcttggaatgccagttgccaatgctgtcatttctgtaccagcagaatttgatctaaaacagagaaattcaacaattgaagctgctaaccttgcaggactgaagattttgagggtaataaatgaacccacagcagcagctatggcctatggtctccacaaggctgacgtcttccacgtcttggtgatagacttgggcggaggaactctagatgtgtctttactgaataaacaaggagggatgtttctaacccgagcaatgtctggaaacaataaacttggaggacaggacttcaatcagagattgcttcagtacttatataaacagatctatcaaacatatggcttcgtgccctctaggaaagaggaaatccacagattgagacaagctgtggaaatggtcaaattaaatctgactcttcatcaatctgctcagttgtcagtattactaacggtggaggagcaggacaggaaggaacctcacagtagtgacactgaactgccaaaagacaaactttcctcagcagatgaccatcgcgtgaacagtgggtttggacgtggcctttctgataagaaaagtggagaaagtcaggttttatttgaaacagaaatatcacggaaactctttgatacccttaatgaagacctctttcagaaaatactggtacccattcagcaagtattgaaagaaggccacctggaaaagactgagattgatgaggtggttttagttgggggctccactcgtattcctcggatccgtcaagtcattcaagagttctttggaaaagatcccaacacatctgtagaccctgacctagcagtagtaacgggagtggctatccaagcagggattgatggaggcttttggcctctccaagtcagtgctttagaaattcccaataagcatttacaaaaaaccaacttcaac

SEQ ID NO: 5350 - DNA, 978 bp, Homo Sapiens
actcagcgctgccctccccagtgcccgggccggtgccctgcgacgccgccgacctgcgcccccggggtgcgcgcggtgctggacggctgctcatgctgtctggtgtgtgcccgccagcgtggcgagagctgctcagatctggagccatgcgacgagagcagtggcctctactgtgatcgcagcgcggaccccagcaaacagactggcatctgcacggcggtagagggagataactgtgtgttcgatggggtcatctaccgcagtggagagaaatttcagccaagctgcaaattccagtgcacctgcagagatgggcagattggctgtgtgccccgctgtcagctggatgtgctactgcctgagcctaactgcccagctccaagaaaagttgaggtgcctggagagtgctgtgaaaagtggatctgtggcccagatgaggaggattcactgggaggccttacccttgcagcttacaggccagaagccaccctaggagtagaagtctctgactcaagtgtcaactgcattgaacagaccacagagtggacagcatgctccaagagctgtggtatggggttctccacccgggtcaccaataggaaccgtcaatgtgagatgctgaaacagactcggctctgcatggtgcggccctgtgaacaagagccagagcagccaacagataagaaaggaaaaaagtgtctccgcaccaagaagtcactcaaagccatccacctgcagttcaagaactgcaccagcctgcacacctacaagcccaggttctgtggggtctgcagtgatggccgctgctgcactccccacaataccaaaaccatccaggcagagtttcagtgctccccagggcaaatagtcaagaagccagtgatggtcattgggacctgcacctgtcacaccaactgtcctaagaacaatgaggccttcctccaggagctggagctgaagactaccagagggaaaatg

SEQ ID NO: 5351 - DNA, 192 bp, Homo Sapiens
gctcacaacaagtttcatgattttgctgatcggaaggattgggatgcattccatcctacactggtggcagaagggctttttgcatttgcaaatgttctaagttatcttcgtctcttttttatgtatacaaccagctctatcttgggtccattacagatttcaatgggacagatgttacaagattttggaaaa

SEQ ID NO: 5352 - DNA, 852 bp, Homo Sapiens
tttcgcatctgcgccttcaatgcccagcggctgacactggccaaggtggccagggagcaggtgatggacaccttagttcggatactggctcgctgtgacatcatggtgctgcaggaggtggtggactcttccggcagcgccatcccgctcctgcttcgagaactcaatcgatttgatggctctgggccctacagcaccctgagcagcccccagctggggcgcagcacctacatggagacgtatgtgtacttctatcggtcacacaaaacacaggtcctgagttcctacgtgtacaacgatgaggatgacgtctttgcccgggagccatttgtggcccagttctctttgcccagcaatgtccttcccagcctggtgttggtcccgctgcacaccactcctaaggccgtagagaaggagctgaacgccctctacgatgtgtttctggaggtctcccagcactggcagagcaaggacgtgatcctgcttggggacttcaatgctgactgcgcttcactgaccaaaaagcgcctggacaagctggagctgcggactgagccaggcttccactgggtgattgccgatggggaggacaccacagtgcgggccagcacccactgcacctatgaccgcgtcgtgctgcacggggagcgctgccggagtctgctgcacactgcggctgcctttgacttccccacgagcttccagctcaccgaggaggaggccctcaacatcagtgaccactaccccgtggaggtggagctgaagctgagccaggcgcacagcgtccagcctctcagcctcactgttctgttgctgctatcactcctgtcccctcagctgtgccctgctgcc

SEQ ID NO: 5353 - DNA, 1131 bp, Homo Sapiens
atggcagaaggcaaccacagaaaaaagccacttaaggtgttggaatccctgggcaaagatttcctcactggtgttttggataacttggtggaacaaaatgtactgaactggaaggaagaggaaaaaaagaaatattacgatgctaaaactgaagacaaagttcgggtcatggcagactctatgcaagagaagcaacgtatggcaggacaaatgcttcttcaaaccttttttaacatagaccaaatatcccccaataaaaaagctcatccgaatatggaggctggaccacctgagtcaggagaatctacagatgccctcaagctttgtcctcatgaagaattcctgagactatgtaaagaaagagctgaagagatctatccaataaaggagagaaacaaccgcacacgcctggctctcatcatatgcaatacagagtttgaccatctgcctccgaggaatggagctgactttgacatcacagggatgaaggagctacttgagggtctggactatagtgtagatgtagaagagaatctgacagccagggatatggagtcagcgctgagggcatttgctaccagaccagagcacaagtcctctgacagcacattcttggtactcatgtctcatggcatcctggagggaatctgcggaactgtgcatgatgagaaaaaaccagatgtgctgctttatgacaccatcttccagatattcaacaaccgcaactgcctcagtctgaaggacaaacccaaggtcatcattgtccaggcctgcagaggtgcaaaccgtggggaactgtgggtcagagactctccagcatccttggaagtggcctcttcacagtcatctgagaacctggaggaagatgctgtttacaagacccacgtggagaaggacttcattgctttctgctcttcaacgccacacaacgtgtcctggagagacagcacaatgggctctatcttcatcacacaactcatcacatgcttccagaaatattcttggtgctgccacctagaggaagtatttcggaaggtacagcaatcatttgaaactccaagggccaaagctcaaatgcccaccatagaacgactgtccatgacaagatatttctacctctttcctggcaat

SEQ ID NO: 5354 - DNA, 474 bp, Homo Sapiens
acccaggactgctccttccaacacagccccatctcctccgacttcgctgtcaaaatccgtgagctgtctgactacctgcttcaagattacccagtcaccgtggcctccaacctgcaggacgaggagctctgcgggggcctctggcggctggtcctggcacagcgctggatggagcggctcaagactgtcgctgggtccaagatgcaaggcttgctggagcgcgtgaacacggagatacactttgtcaccaaatgtgcctttcagcccccccccagctgtcttcgcttcgtccagaccaacatctcccgcctcctgcaggagacctccgagcagctggtggcgctgaagccctggatcactcgccagaacttctcccggtgcctggagctgcagtgtcagcccgactcctcaaccctgccacccccatggagtccccggcccctggaggccacagccccgacagccccgcagccc

SEQ ID NO: 5355 - DNA, 672 bp, Homo Sapiens
attattgatggcgccccatgtgcaagaggctcccacccatggcaggtggccctgctcagtggcaatcagctccactgcggaggcgtcctggtcaatgagcgctgggtgctcactgccgcccactgcaagatgaatgagtacaccgtgcacctgggcagtgatacgctgggcgacaggagagctcagaggatcaaggcctcgaagtcattccgccaccccggctactccacacagacccatgttaatgacctcatgctcgtgaagctcaatagccaggccaggctgtcatccatggtgaagaaagtcaggctgccctcccgctgcgaaccccctggaaccacctgtactgtctccggctggggcactaccacgagcccagatgtgacctttccctctgacctcatgtgcgtggatgtcaagctcatctccccccaggactgcacgaaggtttacaaggacttactggaaaattccatgctgtgcgctggcatccccgactccaagaaaaacgcctgcaatggtgactcagggggaccgttggtgtgcagaggtaccctgcaaggtctggtgtcctggggaactttcccttgcggccaacccaatgacccaggagtctacactcaagtgtgcaagttcaccaagtggataaatgacaccatgaaaaagcatcgc

SEQ ID NO: 5356 - DNA, 714 bp, Homo Sapiens
attattggagggaaagaagtgtcacctcattccaggccatttatggcctccatccagtatggcggacatcacgtttgtggaggtgttctgattgatccacagtgggtgctgacagcagcccactgccaatatcggtttaccaaaggccagtctcccactgtggttttaggcgcacactctctctcaaagaatgaggcctccaaacaaacactggagatcaaaaaatttataccattctcaagagttacatcagatcctcaatcaaatgatatcatgctggttaagcttcaaacagccgcaaaactcaataaacatgtcaagatgctccacataagatccaaaacctctcttagatctggaaccaaatgcaaggttactggctggggagccaccgatccagattcattaagaccttctgacaccctgcgagaagtcactgttactgtcctaagtcgaaaactttgcaacagccaaagttactacaacggcgacccttttatcaccaaagacatggtctgtgcaggagatgccaaaggccagaaggattcctgtaagggtgactcagggggccccttgatctgtaaaggtgtcttccacgctatagtctctggaggtcatgaatgtggtgttgccacaaagcctggaatctacaccctgttaaccaagaaataccagacttggatcaaaagcaaccttgtcccgcctcatacaaat

SEQ ID NO: 5357 - DNA, 1290 bp, Homo Sapiens
tacgccatccagggtctcaaatggcaacataatgaaatcactttctgcatccagaattacacccccaaggtgggcgagtatgccacatacgaggccattcgcaaggcgttccgcgtgtgggagagtgccacaccactgcgcttccgcgaggtgccctatgcctacatccgtgagggccatgagaagcaggccgacatcatgatcttctttgccgagggcttccatggcgacagcacgcccttcgatggtgagggcggcttcctggcccatgcctacttcccaggccccaacattggaggagacacccactttgactctgccgagccttggactgtcaggaatgaggatctgaatggaaatgacatcttcctggtggctgtgcacgagctgggccatgccctggggctcgagcattccagtgacccctcggccatcatggcacccttttaccagtggatggacacggagaattttgtgctgcccgatgatgaccgccggggcatccagcaactttatgggggtgagtcagggttccccaccaagatgccccctcaacccaggactacctcccggccttctgttcctgataaacccaaaaaccccacctatgggcccaacatctgtgacgggaactttgacaccgtggccatgctccgaggggagatgtttgtcttcaaggagcgctggttctggcgggtgaggaataaccaagtgatggatggatacccaatgcccattggccagttctggcggggcctgcctgcgtccatcaacactgcctacgagaggaaggatggcaaattcgtcttcttcaaaggagacaagcattgggtgtttgatgaggcgtccctggaacctggctaccccaagcacattaaggagctgggccgagggctgcctaccgacaagattgatgctgctctcttctggatgcccaatggaaagacctacttcttccgtggaaacaagtactaccgtttcaacgaagagctcagggcagtggatagcgagtaccccaagaacatcaaagtctgggaagggatccctgagtctcccagagggtcattcatgggcagcgatgaagtcttcacttacttctacaaggggaacaaatactggaaattcaacaaccagaagctgaaggtagaaccgggctaccccaagtcagccctgagggactggatgggctgcccatcgggaggccggccggatgaggggactgaggaggagacggaggtgatcatcattgaggtggacgaggagggcggcggggcggtgagcgcggctgcc

SEQ ID NO: 5358 - DNA, 333 bp, Homo Sapiens
atgtcttcagaaagtaaagagcaacataacgtttcacccagagactcagctgaaggaaatgacagttatccatctgggatccatctggaacttcaaagggaatcaagtactgacttcaagcaatttgagaccaatgatcaatgcagaccttatcataggatccttattgagcgtcaagagaaatcagatacaaacttcaaggagtttgttattaaaaagctgcagaagaattgccagtgcagtccagccaaagccaaaaatatgattttaggtttccttcctgttttgcagtggctcccaaaatacgacctaaagaaaaacattttaggggat

SEQ ID NO: 5359 - DNA, 1200 bp, Homo Sapiens
gccgaggtgaagaaacctgcagccgcagcagctcctggcactgcggagaagttgagccccaaggcggccacgcttgccgagcgcagcgccggcctggccttcagcttgtaccaggccatggccaaggaccaggcagtggagaacatcctggtgtcacccgtggtggtggcctcgtcgctggggctcgtgtcgctgggcggcaaggcgaccacggcgtcgcaggccaaggcagtgctgagcgccgagcagctgcgcgacgaggaggtgcacgccggcctgggcgagctgctgcgctcactcagcaactccacggcgcgcaacgtgacctggaagctgggcagccgactgtacggacccagctcagtgagcttcgctgatgacttcgtgcgcagcagcaagcagcactacaactgcgagcactccaagatcaacttccgcgacaagcgcagcgcgctgcagtccatcaacgagtgggccgcgcagaccaccgacggcaagctgcccgaggtcaccaaggacgtggagcgcacggacggcgccctgttagtcaacgccatgttcttcaagccacactgggatgagaaattccaccacaagatggtggacaaccgtggcttcatggtgactcggtcctataccgtgggtgtcatgatgatgcaccggacaggcctctacaactactacgacgacgagaaggaaaagctgcaaatcgtggagatgcccctggcccacaagctctccagcctcatcatcctcatgccccatcacgtggagcctctcgagcgccttgaaaagctgctaaccaaagagcagctgaagatctggatggggaagatgcagaagaaggctgttgccatctccttgcccaagggtgtggtggaggtgacccatgacctgcagaaacacctggctgggctgggcctgactgaggccattgacaagaacaaggccgacttgtcacgcatgtcaggcaagaaggacctgtacctggccagcgtgttccacgccaccgcctttgagttggacacagatggcaacccctttgaccaggacatctacgggcgcgaggagctgcgcagccccaagctgttctacgccgaccaccccttcatcttcctagtgcgggacacccaaagcggctccctgctattcattgggcgcctggtccggcctaagggtgacaagatgcgagacgagtta

SEQ ID NO: 5360 - DNA, 837 bp, Homo Sapiens
gacccgccggcgccgctgccgttggtgatctggcatgggatgggagacagctgttgcaatcccttaagcatgggtgctattaaaaaaatggtggagaagaaaatacctggaatttacgtcttatctttagagattgggaagaccctgatggaggacgtggagaacagcttcttcttgaatgtcaattcccaagtaacaacagtgtgtcaggcacttgctaaggatcctaaattgcagcaaggctacaatgctatgggattctcccagggaggccaatttctgagggcagtggctcagagatgcccttcacctcccatgatcaatctgatctcggttgggggacaacatcaaggtgtttttggactccctcgatgcccaggagagagctctcacatctgtgacttcatccgaaaaacactgaatgctggggcgtactccaaagttgttcaggaacgcctcgtgcaagccgaatactggcatgaccccataaaggaggatgtgtatcgcaaccacagcatcttcttggcagatataaatcaggagcggggtatcaatgagtcctacaagaaaaacctgatggccctgaagaagtttgtgatggtgaaattcctcaatgattccattgtggaccctgtagattcggagtggtttggattttacagaagtggccaagccaaggaaaccattcccttacaggagacctccctgtacacacaggaccgcctggggctaaaggaaatggacaatgcaggacagctagtgtttctggctacagaaggggaccatcttcagttgtctgaagaatggttttatgcccacatcataccattccttgga

SEQ ID NO: 5361 - DNA, 696 bp, Homo Sapiens
atcatcgggggccgggaggtgatcccccactcgcgcccgtacatggcctcactgcagagaaatggctcccacctgtgcgggggtgtcctggtgcacccaaagtgggtgctgacggctgcccactgcctggcccagcggatggcccagctgaggctggtgctggggctccacaccctggacagccccggtctcaccttccacatcaaggcagccatccagcaccctcgctacaagcccgtccctgccctggagaacgacctcgcgctgcttcagctggacgggaaagtgaagcccagccggaccatccggccgttggccctgcccagtaagcgccaggtggtggcagcagggactcggtgcagcatggccggctgggggctgacccaccagggcgggcgcctgtcccgggtgctgcgggagctggacctccaagtgctggacacccgcatgtgtaacaacagccgcttctggaacggcagcctctcccccagcatggtctgcctggcggccgactccaaggaccaggctccctgcaagggtgactcgggcgggcccctggtgtgtggcaaaggccgggtgttggccggagtcctgtccttcagctccagggtctgcactgacatcttcaagcctcccgtggccaccgctgtggcgccttacgtgtcctggatcaggaaggtcaccggccgatcggcc

SEQ ID NO: 5362 - DNA, 702 bp, Homo Sapiens
tgcctctatgtgctgatgcagacagtggacccgtacacaccggactaccaagaccagctacggtcaccaggggtaaccttaaggccggatgtttacggggagaaaggcctggaaattgtctacaacgtctctgataacagaacctgggcagacctcacacagactctccacgccttcctagcaggctactctccagcagcccaggaggacagcatcaactgcacctccgagcagtacttcttccaggagagtttccgcgctcccaaccacaccaagttctcctgcaagttcacggcagatatgctgcagaactgctcaggcctggcggatcccaacttcggctttgaagaaggaaagccatgttttattattaaaatgaacaggatcgtcaagttcctccccagcaacggctcggcccccagagtggactgcgccttcctggaccagccccgcgagctcggccagccgctgcaggtcaagtactaccctcccaacggcaccttcagtctgcactacttcccttattacgggaagaaagcccagccccactacagcaaccccctggtggcagcgaagctcctcaacatccccaggaacgctgaggtcgccatcgtgtgcaaggtcatggcagagcacgtgaccttcaacaatccccacgacccgtatgaagggaaagtggagttcaaactcaagattgagaag

SEQ ID NO: 5363 - DNA, 1383 bp, Homo Sapiens
aggacctacttgagctgggaggtcagcgtctccctctccgtaggcttcaagaccatggacttccctgccgtcaccatctgcaatgctagccccttcaagtattccaaaatcaagcatttgctgaaggacctggatgagctgatggaagctgtcctggagagaatcctggctcctgagctaagccatgccaatgccaccaggaacctgaacttctccatctggaaccacacacccctggtccttattgatgaacggaacccccaccaccccatggtccttgatctctttggagacaaccacaatggcttaacaagcagctcagcatcagaaaagatctgtaatgcccacgggtgcaaaatggccatgagactatgtagcctcaacaggacccagtgtaccttccggaacttcaccagtgctacccaggcattgacagagtggtacatcctgcaggccaccaacatctttgcacaggtgccacagcaggagctagtagagatgagctaccccggcgagcagatgatcctggcctgcctattcggagctgagccctgcaactaccggaacttcacgtccatcttctaccctcactatggcaactgttacatcttcaactggggcatgacagagaaggcacttccttcggccaaccctggaactgaattcggcctgaagttgatcctggacataggccaggaagactacgtccccttccttgcgtccacggccggggtcaggctgatgcttcacgagcagaggtcataccccttcatcagagatgagggcatctacgccatgtcggggacagagacgtccatcggggtactcgtggacaagcttcagcgcatgggggagccctacagcccgtgcaccgtgaatggttctgaggtccccgtccaaaacttctacagtgactacaacacgacctactccatccaggcctgtcttcgctcctgcttccaagaccacatgatccgtaactgcaactgtggccactacctgtacccactgccccgtggggagaaatactgcaacaaccgggacttcccagactgggcccattgctactcagatctacagatgagcgtggcgcagagagagacctgcattggcatgtgcaaggagtcctgcaatgacacccagtacaagatgaccatctccatggctgactggccttctgaggcctccgaggactggattttccacgtcttgtctcaggagcgggaccaaagcaccaatatcaccctgagcaggaagggaattgtcaagctcaacatctacttccaagaatttaactatcgcaccattgaagaatcagcagccaataacatcgtctggctgctctcgaatctgggtggccagtttggcttctggatggggggc

SEQ ID NO: 5364 - DNA, 1395 bp, Homo Sapiens
tccttctatactgtctcagtttccatcaaagtccacttccggaagctggattttcctgcagtcaccatctgcaacatcaacccctacaagtacagcaccgttcgccaccttctagctgacttggaacaggagaccagagaggccctgaagtccctgtatggctttccagagtcccggaagcgccgagaggcggagtcctggaactccgtctcagagggaaagcagcctagattctcccaccggattccgctgctgatctttgatcaggatgagaagggcaaggccagggacttcttcacagggaggaagcggaaagtcggcggtagcatcattcacaaggcttcaaatgtcatgcacatcgagtccaagcaagtggtgggattccaactgtgctcaaatgacacctccgactgtgccacctacaccttcagctcgggaatcaatgccattcaggagtggtataagctacactacatgaacatcatggcacaggtgcctctggagaagaaaatcaacatgagctattctgctgaggagctgctggtgacctgcttctttgatggagtgtcctgtgatgccaggaatttcacgcttttccaccacccgatgcatgggaattgctatactttcaacaacagagaaaatgagaccattctcagcacctccatggggggcagcgaatatgggctgcaagtcattttgtacataaacgaagaggaatacaacccattcctcgtgtcctccactggagctaaggtgatcatccatcggcaggatgagtatcccttcgtcgaagatgtgggaacagagattgagacagcaatggtcacctctataggaatgcacctgacagagtccttcaagctgagtgagccctacagtcagtgcacggaggacgggagtgacgtgccaatcaggaacatctacaacgctgcctactcgctccagatctgccttcattcatgcttccagacaaagatggtggagaaatgtgggtgtgcccagtacagccagcctctacctcctgcagccaactactgcaactaccagcagcaccccaactggatgtattgttactaccaactgcatcgagcctttgtccaggaagagctgggctgccagtctgtgtgcaaggaagcctgcagctttaaagagtggacactaaccacaagcctggcacaatggccatctgtggtttcggagaagtggttgctgcctgttctcacttgggaccaaggccggcaagtaaacaaaaagctcaacaagacagacttggccaaactcttgatattctacaaagacctgaaccagagatccatcatggagagcccagccaacagtattgagatgcttctgtccaacttcggtggccagctgggcctgtggatgagctgc

SEQ ID NO: 5365 - DNA, 864 bp, Homo Sapiens
tatgagaagggctaccagacctcgagcggcctcatcagcagtgtctctgtgaaactcaagggcctggccgtgacccagctccctggcctcggcccccaggtctgggatgtggctgactacgtcttcccagcccagggggacaactccttcgtggtcatgaccaatttcatcgtgaccccgaagcagactcaaggctactgcgcagagcacccagaagggggcatatgcaaggaagacagtggctgtacccctgggaaggccaagaggaaggcccaaggcatccgcacgggcaagtgtgtggccttcaacgacactgtgaagacgtgtgagatctttggctggtgccccgtggaggtggatgacgacatcccgcgccctgcccttctccgagaggccgagaacttcactcttttcatcaagaacagcatcagctttccacgcttcaaggtcaacaggcgcaacctggtggaggaggtgaatgctgcccacatgaagacctgcctctttcacaagaccctgcaccccctgtgcccagtcttccagcttggctacgtggtgcaagagtcaggccagaacttcagcaccctggctgagaagggtggagtggttggcatcaccatcgactggcactgtgacctggactggcacgtacggcactgcagacccatctatgagttccatgggctgtacgaagagaaaaatctctccccaggcttcaacttcaggtttgccaggcactttgtggagaacgggaccaactaccgtcacctcttcaaggtgtttgggattcgctttgacatcctggtggacggcaaggccgggaagtttgacatcatccctacaatgaccaccatcggctctgga

SEQ ID NO: 5366 - DNA, 1626 bp, Homo Sapiens
cagcccccgccgccgccgccggacgccacctgtcaccaagtccgctccttcttccagagactgcagcccggactcaagtgggtgccagaaactcccgtgccaggatcagatttgcaagtatgtctccctaagggcccaacatgctgctcaagaaagatggaagaaaaataccaactaacagcacgattgaacatggaacagctgcttcagtctgcaagtatggagctcaagttcttaattattcagaatgctgcggttttccaagaggcctttgaaattgttgttcgccatgccaagaactacaccaatgccatgttcaagaacaactacccaagcctgactccacaagcttttgagtttgtgggtgaatttttcacagatgtgtctctctacatcttgggttctgacatcaatgtagatgacatggtcaatgaattgtttgacagcctgtttccagtcatctatacccagctaatgaacccaggcctgcctgattcagccttggacatcaatgagtgcctccgaggagcaagacgtgacctgaaagtatttgggaatttccccaagcttattatgacccaggtttccaagtcactgcaagtcactaggatcttccttcaggctctgaatcttggaattgaagtgatcaacacaactgatcacctgaagttcagtaaggactgtggccgaatgctcaccagaatgtggtactgctcttactgccagggactgatgatggttaaaccctgtggcggttactgcaatgtggtcatgcaaggctgtatggcaggtgtggtggagattgacaagtactggagagaatacattctgtcccttgaagaacttgtgaatggcatgtacagaatctatgacatggagaacgtactgcttggtctcttttcaacaatccatgattctatccagtatgtccagaagaatgcaggaaagctgaccaccactattggcaagttatgtgcccattctcaacaacgccaatatagatttgcttattatcctgaagatctctttattgacaagaaagtattaaaagttgctcatgtagaacatgaagaaaccttatccagccgaagaagggaactaattcagaagttgaagtctttcatcagcttctatagtgctttgcctggctacatctgcagccatagccctgtggcggaaaacgacaccctttgctggaatggacaagaactcgtggagagatacagccaaaaggcagcaaggaatggaatgaaaaaccagttcaatctccatgagctgaaaatgaagggccctgagccagtggtcagtcaaattattgacaaactgaagcacattaaccagctcctgagaaccatgtctatgcccaaaggtagagttctggataaaaacctggatgaggaagggtttgaaagtggagactgcggtgatgatgaagatgagtgcattggaggctctggtgatggaatgataaaagtgaagaatcagctccgcttccttgcagaactggcctatgatctggatgtggatgatgcgcctggaaacagtcagcaggcaactccgaaggacaacgagataagcacctttcacaacctcgggaacgttcattccccgctgaagcttctcacc

SEQ ID NO: 5367 - DNA, 195 bp, Homo Sapiens
tcactgccagtttacatgtacttcaatctgtggaccatctgccggaacaccacattagtggagggagcaaatctctgcttggaccttcgtcagtttggaattgtgacaattggagaggaaaagaaaatttgtactgtctctgagaatttcttgaggatgtgcgaatctactgagctgaacatgaccttccacttg

SEQ ID NO: 5368 - DNA, 144 bp, Homo Sapiens
atgacacccacagacttcacaagccctattcctaacatggctgatgactatggctctgaatccacatcttccatggaagactacgttaacttcaacttcactgacttctactgtgagaaaaacaatgtcaggcagtttgcgagc

SEQ ID NO: 5369 - DNA, 1446 bp, Homo Sapiens
cgtccccggaacgcactgctgctcctcgcggatgacggaggctttgagagtggcgcgtacaacaacagcgccatcgccaccccgcacctggacgccttggcccgccgcagcctcctctttcgcaatgccttcacctcggtcagcagctgctctcccagccgcgccagcctcctcactggcctgccccagcatcagaatgggatgtacgggctgcaccaggacgtgcaccacttcaactccttcgacaaggtgcggagcctgccgctgctgctcagccaagctggtgtgcgcacaggcatcatcgggaagaagcacgtggggccggagaccgtgtacccgtttgactttgcgtacacggaggagaatggctccgtcctccaggtggggcggaacatcactagaattaagctgctcgtccggaaattcctgcagactcaggatgaccggcctttcttcctctacgtcgccttccacgacccccaccgctgtgggcactcccagccccagtacggaaccttctgtgagaagtttggcaacggagagagcggcatgggtcgtatcccagactggaccccccaggcctacgacccactggacgtgctggtgccttacttcgtccccaacaccccggcagcccgagccgacctggccgctcagtacaccaccgtaggccgcatggaccaaggagttggactggtgctccaggagctgcgtgacgccggtgtcctgaacgacacactggtgatcttcacgtccgacaacgggatccccttccccagcggcaggaccaacctgtactggccgggcactgctgaacccttactggtgtcatccccggagcacccaaaacgctggggccaagtcagcgaggcctacgtgagcctcctagacctcacgcccaccatcttggattggttctcgatcccgtaccccagctacgccatctttggctcgaagaccatccacctcactggccggtccctcctgccggcgctggaggccgagcccctctgggccaccgtctttggcagccagagccaccacgaggtcaccatgtcctaccccatgcgctccgtgcagcaccggcacttccgcctcgtgcacaacctcaacttcaagatgccctttcccatcgaccaggacttctacgtctcacccaccttccaggacctcctgaaccgcactacagctggtcagcccacgggctggtacaaggacctccgtcattactactaccgggcgcgctgggagctctacgaccggagccgggacccccacgagacccagaacctggccaccgacccgcgctttgctcagcttctggagatgcttcgggaccagctggccaagtggcagtgggagacccacgacccctgggtgtgcgcccccgacggcgtcctggaggagaagctctctccccagtgccagcccctccacaatgagctg

SEQ ID NO: 5370 - DNA, 1680 bp, Homo Sapiens
aaaactgcaaatgcctttaaaccaaatatcctactgatcatggcggatgatctaggcactggggatctcggttgctacgggaacaatacactgagaacgccgaatattgaccagcttgcagaggaaggtgtgaggctcactcagcacctggcggccgccccgctctgcaccccaagccgagctgcattcctcacagggagacattccttcagatcaggcatggacgccagcaatggataccgggcccttcagtggaacgcaggctcaggtggactccctgagaacgaaaccacttttgcaagaatcttgcagcagcatggctatgcaaccggcctcataggaaaatggcaccagggtgtgaattgtgcatcccgcggggatcactgccaccaccccctgaaccacggatttgactatttctacggcatgcccttcacgctcacaaacgactgtgacccaggcaggccccccgaagtggacgccgccctgagggcgcagctctggggttacacccagttcctggcgctggggattctcaccctggctgccggccagacctgcggtttcttctctgtctccgcgagagcagtcaccggcatggccggcgtgggctgcctgtttttcatctcttggtactcctccttcgggtttgtgcgacgctggaactgtattctgatgagaaaccatgacgtcacggagcaacccatggttctggagaaaacagcgagtcttatgctaaaggaagctgtttcctatattgaaagacacaagcatgggccatttctcctcttcctttctttgctgcatgtgcacattccccttgtgaccacgagtgcattcctggggaaaagtcagcatggcttatatggtgataatgtggaggagatggactggctcataggtaaggttcttaatgccatcgaagacaatggtttaaagaactcaacattcacgtatttcacctctgaccatggaggacatttagaggcaagagatggacacagccagttagggggatggaacggaatttacaaaggtgggaagggcatgggaggatgggaaggtgggatccgcgtgcccgggatcttccactggccgggggtgctcccggccggccgagtgattggagagcccacgagcctgatggacgtgttccctactgtggtccagctggtgggtggcgaggtgccccaggacagggtgattgatggccacagcctggtacccttgctgcagggagctgaggcacgctcggcacatgagttcctgtttcattactgtgggcagcatcttcacgcagcacgctggcaccagaaggacagtggaagcgtctggaaggttcattacacgaccccgcagttccaccccgagggagcgggggcctgctacggccgaggcgtctgcccatgctccggggagggcgtgacccatcacagaccccctttgctctttgacctctccagggacccctccgaggcacggcccctgacccccgactccgagcccctgtaccacgccgtgatagcaagggtaggtgccgcggtgtcggagcatcggcagaccctgagtcctgtgccccagcagttttccatgagcaacatcctgtggaagccgtggctgcagccgtgctgcggacatttcccgttctgttcatgccacgaggatggggatggcaccccc

SEQ ID NO: 5371 - DNA, 1674 bp, Homo Sapiens
gacatttccgcctcccgaccgaacatccttcttctgatggcggacgaccttggcattggggacgttggctgctatggcaacaacaccatgaggactccgaatattgaccgccttgcagaggacggcgtgaagctgacccaacacatctctgccgcatctttgtgcaccccaagcagagccgccttcctcacgggcagataccctgtgcgatcagggatggtttccagcattggttaccgtgttcttcagtggaccggagcatctggaggtcttccaacaaatgagacaacttttgcaaaaatactgaaagagaaaggctatgccactggactcattggaaaatggcatctgggtctcaactgtgagtcagccagtgatcattgccaccaccctctccatcatggctttgaccatttctacggaatgcctttctccttgatgggtgattgcgcccgctgggaactctcagagaagcgtgtcaacctggaacaaaaactcaacttcctcttccaagtcctggccttggttgccctcacactggtagcagggaagctcacacacctgatacccgtctcgtggatgccggtcatctggtcagccctttcggccgtcctcctcctcgcaagctcctattttgtgggtgctctgattgtccatgccgattgctttctgatgagaaaccacaccatcacggagcagcccatgtgcttccaaagaacgacaccccttattctgcaggaggttgcgtcctttctcaaaaggaataagcatgggcctttcctcctctttgtttcctttctacacgttcacatccctcttatcactatggagaacttcctcgggaagagtctccacgggctgtatggggacaacgtagaggagatggactggatggtaggacggatccttgacactttggacgtggagggtttgagcaacagcaccctcatttattttacgtcggatcacggcggttccctagagaatcaacttggaaacacccagtatggtggctggaatggaatttataaaggtgggaagggcatgggaggatgggaaggtgggatccgcgtgcccgggatcttccgctggcccggggtgctcccggccggccgagtgattggcgagcccacgagtctgatggacgtgttccccaccgtggtccggctggcgggcggcgaggtgccccaggacagagtgattgacggccaagaccttctgcccttgctcctggggacagcccaacactcagaccacgagttcctgatgcattattgtgagaggtttctgcacgcagccaggtggcatcaacgggacagaggaacaatgtggaaagtccactttgtgacgcctgtgttccagccagagggagccggtgcctgctatggaagaaaggtctgcccgtgctttggggaaaaagtagtccaccacgatccacctttgctctttgacctctcaagagacccttctgagacccacatcctcacaccagcctcagagcccgtgttctatcaggtgatggaacgagtccagcaggcggtgtgggaacaccagcggacactcagcccagttcctctgcagctggacaggctgggcaacatctggagaccgtggctgcagccctgctgtggcccgttccccctctgctggtgccttagggaagatgacccacaa

SEQ ID NO: 5372 - DNA, 1626 bp, Homo Sapiens
agcctggccggtgggagccccggcgcggccgaggccccggggtcggcccaggtggctggactatgcgggcgcctaacccttcaccgggacctgcgcaccggccgctgggaaccagacccacagcgctctcgacgctgtctccgggacccgcagcgcgtgctggagtactgcagacagatgtacccggagctgcagattgcacgtgtggagcaggctacgcaggccatccccatggagcgctggtgcgggggttcccggagcggcagctgcgcccacccccaccaccaggttgtgcccttccgctgcctgcctggtgaatttgtgagtgaggccctgctggtgcctgaaggctgccggttcttgcaccaggagcgcatggaccaatgtgagagttcaacccggaggcatcaggaggcacaggaggcctgcagctcccagggcctcatcctgcacggctcgggcatgctcttaccctgtggctcggatcggttccgtggtgtggagtatgtgtgctgtccccctccagggacccccgacccatctgggacagcagttggtgacccctccacccggtcctggcccccggggagcagagtagagggggctgaggacgaggaagaggaggaatccttcccacagccagtagatgattacttcgtggagcctccgcaggctgaagaggaagaggaaacggtcccacccccaagctcccatacacttgcagtggtcggcaaagtcactcccaccccgaggcccacagacggtgtggatatttactttggcatgcctggggaaatcagtgagcacgaggggttcctgagggccaagatggacctggaggagcgtaggatgcgccagattaatgaggtgatgcgtgaatgggccatggcagacaaccagtccaagaacctgcctaaagccgacagacaggccctgaatgagcacttccagtccattctgcagactctggaggagcaggtgtctggtgagcgacagcgcctggtggaaacccacgccacccgcgtcatcgcccttatcaacgaccagcgccgggctgccttggagggcttcctggcagccctgcaggcagatccgcctcaggcggagcgtgtcctgttggccctgcggcgctacctgcgtgcggagcagaaggaacagaggcacacgctgcgccactaccagcatgtggccgccgtggatcccgagaaggcacagcagatgcgcttccaggtgcatacccaccttcaagtgattgaggagagggtgaatcagagcctgggcctgcttgaccagaacccccacctggctcaggagctgcggccccaaatccaggaactcctccactctgaacacctgggtcccagtgaattggaagcccctgcccctgggggcagcagcgaggacaagggtgggctgcagcctccagattccaaggatgacacccccatgacccttccaaaagggtccacagaacaagatgctgcatcccctgagaaagagaagatgaacccgctggaacagtatgagcgaaaggtgaatgcgtctgttccaaggggtttccctttccactcatcggagattcagagggatgagctggcaccagctgggacaggggtgtcccgtgag

SEQ ID NO: 5373 - DNA, 153 bp, Homo Sapiens
tactttcagtcaggcaacaatgaagagccttatgtcagtatcaccaagaagaggcaaatgccaaaaaatggcctctcagaggagattgagaaggaggtgggccaggcagaaggcaaactaatcacccaccgatcagcgttcagccgggcgtcg

SEQ ID NO: 5374 - DNA, 1251 bp, Homo Sapiens
ctcccctacaagataggggtggtgggcccttgggcttgtgattcgctgttttcaaaggccctgcctgaggttgctgcgcgattagccattgagcgaatcaaccgggacccatcttttgacctgagttattcttttgaatacgtgattctcaatgaagactgccagacttcgagggctctctccagtttcatttcccaccaccagatggcctcaggatttattggacctaccaaccctggctactgcgaggcagcctcgctcctgggaaacagctgggacaaaggaattttctcttgggcttgtgtgaattatgaattagacaataaaattagctacccgaccttttctcggacactcccttctcccatccgggtgcttgtaactgtcatgaaatatttccagtgggctcatgctggagtcatttcctcagatgaagacatttgggtgcatacagccaatcgagtcgcaagtgctcttcggagccacggcttacctgtaggggtcgtcctgaccacaggacaagacagccaaagcatgcggaaagccctccagaggattcaccaggcagacagaattcgcataatcatcatgtgtatgcattcagctttgattgggggagagactcagatgcatctcttggaatgtgctcatgatctgaaaatgactgatggaacctacgtctttgttccttatgatgccctgctctacagtttaccttataagcacaccccctaccgggtcctaaggaacaacccaaagctccgggaagcctatgatgcagtgttgaccattacagtggagtcccaagaaaagaccttctatcaagccttcacagaggcagcagcaagaggtgaaattcctgagaagctggagttcgatcaagtttcaccgttgtttggaaccatctacaattcaatttactttatcgcacaagccatgaataatgctatgaaagaaaatggacaggctggtgctgccagcctggttcagcattccagaaacatgcagttccatggattcaaccagttgatgaggacagattcaaatggaaatggaatttcagaatatgtaatcctggacaccaacttgaaagaatgggaactccatagcacctacactgtggacatggaaatggagctgctacgtttcggagggacccctattcacttccctggtggcaggccccctagagcagatgcaaaatgctggtttgcagaagggaagatctgccatggaggcatcgaccctgcc

SEQ ID NO: 5375 - DNA, 642 bp, Homo Sapiens
gtggcggctcaaaactcagctgaagtggttcgttgcctcaacagtgctctacaggtcggctgcggggcttttgcatgcctggaaaactccacctgtgacacagatgggatgtatgacatctgtaaatccttcttgtacagcgctgctaaatttgacactcagggaaaagcattcgtcaaagagagcttaaaatgcatcgccaacggggtcacctccaaggtcttcctcgccattcggaggtgctccactttccaaaggatgattgctgaggtgcaggaagagtgctacagcaagctgaatgtgtgcagcatcgccaagcggaaccctgaagccatcactgaggtcgtccagctgcccaatcacttctccaacagatactataacagacttgtccgaagcctgctggaatgtgatgaagacacagtcagcacaatcagagacagcctgatggagaaaattgggcctaacatggccagcctcttccacatcctgcagacagaccactgtgcccaaacacacccacgagctgacttcaacaggagacgcaccaatgagccgcagaagctgaaagtcctcctcaggaacctccgaggtgaggaggactctccctcccacatcaaacgcacatcccatgagagtgca

SEQ ID NO: 5376 - DNA, 819 bp, Homo Sapiens
cagagccaccccatcacacgacgagacctcttctctcaagagattcagctggacatggccctggcctcctttgatgaccagtacgctggctgtgctgctgccatgacagctgctctcccggatctcaaccacacggagttccaggccaaccaggtgtatgcagacagctggacactggcaagcagccaatggcaggagcgtcaggccaggtggccagagtggagtctcagccccacccgtccatccccgccacccctgggcttccgcgatgagcatggggtggccctcctggcctacacagccaacagccccctgcacaaggagttcaatgcagccgtgcgtgaggcgggccgctcccgggcccactacctccaccacttctccttcaagacactccatttcctgctgactgaggccctgcagctcctgggcagcggccagcgtccaccccggtgccaccaggtgttccgaggtgtgcacggcctgcgcttccggccagcagggccccgggccaccgtgaggctggggggctttgcttctgcctccctgaagcatgttgcagcccagcagtttggtgaggacaccttcttcggcatctggacctgccttggggcccctatcaagggctactccttcttccctggagaggaagaggtgctgatccccccctttgagaccttccaagtgatcaatgccagcagactggcccagggccccgcccgcatctacctccgagccctgggcaagcacagcacctacaactgcgagtacatcaaagacaagaagtgcaagtctgggccttgccatctggataattca

SEQ ID NO: 5377 - DNA, 1317 bp, Homo Sapiens
gacacacctgccaactgcacctatcttgacctgctgggcacctgggtcttccaggtgggctccagcggttcccagcgcgatgtcaactgctcggttatgggaccacaagaaaaaaaagtagtggtgtaccttcagaagctggatacagcatatgatgaccttggcaattctggccatttcaccatcatttacaaccaaggctttgagattgtgttgaatgactacaagtggtttgccttttttaagtataaagaagagggcagcaaggtgaccacttactgcaacgagacaatgactgggtgggtgcatgatgtgttgggccggaactgggcttgtttcaccggaaagaaggtgggaactgcctctgagaatgtgtatgtcaacacagcacaccttaagaattctcaggaaaagtattctaataggctctacaagtatgatcacaactttgtgaaagctatcaatgccattcagaagtcttggactgcaactacatacatggaatatgagactcttaccctgggagatatgattaggagaagtggtggccacagtcgaaaaatcccaaggcccaaacctgcaccactgactgctgaaatacagcaaaagattttgcatttgccaacatcttgggactggagaaatgttcatggtatcaattttgtcagtcctgttcgaaaccaagcatcctgtggcagctgctactcatttgcttctatgggtatgctagaagcgagaatccgtatactaaccaacaattctcagaccccaatcctaagccctcaggaggttgtgtcttgtagccagtatgctcaaggctgtgaaggcggcttcccataccttattgcaggaaagtacgcccaagattttgggctggtggaagaagcttgcttcccctacacaggcactgattctccatgcaaaatgaaggaagactgctttcgttattactcctctgagtaccactatgtaggaggtttctatggaggctgcaatgaagccctgatgaagcttgagttggtccatcatgggcccatggcagttgcttttgaagtatatgatgacttcctccactacaaaaaggggatctaccaccacactggtctaagagaccctttcaacccctttgagctgactaatcatgctgttctgcttgtgggctatggcactgactcagcctctgggatggattactggattgttaaaaacagctggggcaccggctggggtgagaatggctacttccggatccgcagaggaactgatgagtgtgcaattgagagcatagcagtggcagccacaccaattcctaaattg

SEQ ID NO: 5378 - DNA, 192 bp, Homo Sapiens
caggagcctcccggagctgcttgttctcagaacacaaacaaaacctgtgaagagtgcctgaagaacgtctcctgtctttggtgcaacactaacaaggcttgtctggactacccagttacaagcgtcttgccaccggcttccctttgtaaattgagctctgcacgctggggagtttgttgggtgaactttgag

SEQ ID NO: 5379 - DNA, 675 bp, Homo Sapiens
aatgaagataaggatcccgcttttactgctttgttaaccacccaaacacaagtgcaaagggagattgtgaataagcacaatgaactgaggagagcagtatctccccctgccagaaacatgctgaagatggaatggaacaaagaggctgcagcaaatgcccaaaagtgggcaaaccagtgcaattacagacacagtaacccaaaggatcgaatgacaagtctaaaatgtggtgagaatctctacatgtcaagtgcctccagctcatggtcacaagcaatccaaagctggtttgatgagtacaatgattttgactttggtgtagggccaaagactcccaacgcagtggttggacattatacacaggttgtttggtactcttcatacctcgttggatgtggaaatgcctactgtcccaatcaaaaagttctaaaatactactatgtttgccaatattgtcctgctggtaattgggctaatagactatatgtcccttatgaacaaggagcaccttgtgccagttgcccagataactgtgacgatggactatgcaccaatggttgcaagtacgaagatctctatagtaactgtaaaagtttgaagctcacattaacctgtaaacatcagttggtcagggacagttgcaaggcctcctgcaattgttcaaacagcatttat

SEQ ID NO: 5380 - DNA, 1356 bp, Homo Sapiens
aaagaggtctgctacggacaacttggctgcttttctgatgaaaaaccatgggcaggaacccttcagcgacctgtaaaattacttccctggtcccccgaggacattgacacccgctttcttctgtacacaaatgaaaatccaaacaacttccaactaatcactggcacggaaccagacaccattgaggcttcaaacttccaactggaccgcaagacacgcttcatcatccatggcttcttagacaaggcggaggacagctggccatcggacatgtgcaagaaaatgtttgaagtggagaaggtgaactgcatctgtgtggactggaggcacgggtcccgggcaatgtacacccaagccgtgcaaaacattcgggttgttggggcggagacagctttcttaatacaagcactgtcgacgcagctggggtacagccttgaggacgtgcatgtcatcggccacagcctgggcgcgcacacggccgcggaggcgggcaggaggctggggggccgcgtgggcaggatcacagggctggatccagcagggccgtgcttccaggatgaacctgaggaggttcggttggatccatctgacgccgtgtttgtggatgtgattcacacagattcttctcccatagttccttccctaggtttcggaatgagccaaaaggtgggccatctggatttctttccaaatggaggaaaggaaatgcccggatgtaagaaaaatgtcctttcaaccattactgatattgatggaatatgggaaggaattggtggctttgtgtcttgcaatcacctaagaagcttcgagtattactcaagcagcgtcctcaaccctgatggcttcctgggctatccctgtgcctcctacgatgagtttcaggagagtaagtgtttcccttgtccagctgaaggatgccccaaaatggggcactatgctgaccaatttaaggggaaaacaagtgctgtggaacaaacctttttcctgaacacaggagagagtggtaactttactagttggagatataaggtatcagtcacactttctggaaaagagaaagtgaatgggtacatcaggattgctttgtatggaagtaatgaaaactcgaaacaatatgagattttcaaaggatccctcaaaccagatgcaagtcacacgtgtgctattgatgtggattttaatgttggaaaaatacagaaagttaaattcctctggaacaaacgtgggataaatctatctgagcccaaactgggggcttcccaaatcacagtgcaaagtggtgaagatgggactgagtataatttttgtagcagcgacactgtggaagaaaacgtcttgcaatctctttacccttgt

SEQ ID NO: 5381 - DNA, 669 bp, Homo Sapiens
acgatgtgggttatgcttcagactctcaacgatgaggttccaaaataccgtgaccagattcctagcccaggactcatggtttttccaaaaccagtgaccgcattggaatatacattcagtaggtctgatccaacttcgtatgcagggtacattgaagaccttaagaagtttctaaaaccatatactttagaagaacagaagaacctcacagtctgtcctgatggagcactttttgaacagaagggtccagtttatgttgcatgtcagtttcctatttcattacttcaagcatgcagtggtatgaatgatcctgattttggctattctcaaggaaacccttgtattcttgtgaaaatgaacagaataattggattaaagcctgaaggagtgccaaggatagattgtgtttcaaagaatgaagatataccaaatgtagcagtttatcctcataatggaatgatagacttaaaatatttcccatattatgggaaaaaactgcatgttgggtatctacagccattggttgctgttcaggtcagctttgctcctaacaacactgggaaagaagtaacagttgagtgcaagattgatggatcagccaacctaaaaagtcaggatgatcgtgacaagtttttgggacgagttatgttcaaaatcacagcacgtgca

SEQ ID NO: 5382 - DNA, 1704 bp, Homo Sapiens
cacagggtgcatgacgacaagcctaatattgtcctaatcatggttgatgacctgggtattggagatctgggctgctacggcaatgacaccatgaggacgcctcacatcgaccgccttgccagggaaggcgtgcgactgactcagcacatctctgccgcctccctctgcagcccaagccggtccgcgttcttgacgggaagataccccatccgatcaggtatggtttctagtggtaatagacgtgtcatccaaaatcttgcagtccccgcaggcctccctcttaatgagacaacacttgcagccttgctaaagaagcaaggatacagcacggggcttataggcaaatggcaccaaggcttgaactgcgactcccgaagtgaccagtgccaccatccatataattatgggtttgactactactatggcatgccgttcactctcgttgacagctgctggccggacccctctcgtaacacggaattagcctttgagagtcagctctggctctgtgtgcagctagttgccattgccatcctcaccctaacctttgggaagctgagcggctgggtctctgttccctggctcctgatcttctccatgattctgtttattttcctcttgggctatgcttggttctccagccacacgtcccctttatactgggactgcctcctcatgcgggggcacgagatcacggagcagcccatgaaggctgaacgagctggatccattatggtgaaggaagcgatttcctttttagaaaggcacagtaaggaaactttccttctctttttctcctttcttcacgtgcacacacctctccccaccacggacgatttcactggcaccagcaagcatggcttgtatggggataatgtggaagagatggactccatggtgggcaagattcttgatgctatcgatgattttggcctaaggaacaacacccttgtctactttacatcagatcacggagggcatttggaagctaggcgagggcatgcccaacttggtggatggaatggaatatacaaaggtggaaaaggcatggggggctgggaaggtggaatccgcgtcccaggaattgtccgatggcctggaaaggtaccagctggacggttgattaaggaacctacaagtttaatggatattttaccaactgtcgcatcagtgtcaggaggaagtctccctcaggacagggtcattgacggccgagacctcatgcccttgctgcagggcaacgtcaggcactcggagcatgaatttcttttccactactgtggctcctacctgcacgccgtgcggtggatccccaaggacgacagtgggtcagtttggaaggctcactatgtgaccccggtattccagccaccagcttctggtggctgctatgtcacctcattatgcagatgtttcggagaacaggttacctaccacaacccccctctgctcttcgatctctccagggacccctcagagtccacacccctgacacctgccacagagcccctctatgattttgtgattaaaaaggtggccaacgccctgaaggaacaccaggaaaccatcgtgcctgtgacctaccaactctcagaactgaatcagggcaggacgtggctgaagccttgctgtggggtgttcccattttgtctgtgtgacaaggaagaggaagtctctcagcctcggggtcctaacgagaagaga

SEQ ID NO: 5383 - DNA, 1929 bp, Homo Sapiens
tacgtgctcgacgactccgacgggctgggccgggagttcgacggcatcggcgcggtcagcggcggcggggcaacctcccgacttctagtaaattacccagagccctatcgttctcagatattggattatctctttaagccgaattttggtgcctctttgcatattttaaaagtggaaataggtggtgatgggcagacaacagatggcactgagccctcccacatgcattatgcactagatgagaattatttccgaggatacgagtggtggttgatgaaagaagctaagaagaggaatcccaatattacactcattgggttgccatggtcattccctggatggctgggaaaaggtttcgactggccttatgtcaatcttcagctgactgcctattatgtcgtgacctggattgtgggcgccaagcgttaccatgatttggacattgattatattggaatttggaatgagaggtcatataatgccaattatattaagatattaagaaaaatgctgaattatcaaggtctccagcgagtgaaaatcatagcaagtgataatctctgggagtccatctctgcatccatgctccttgatgccgaactcttcaaggtggttgatgttataggggctcattatcctggaacccattcagcaaaagatgcaaagttgactgggaagaagctttggtcttctgaagactttagcactttaaatagtgacatgggtgcaggctgctggggtcgcattttaaatcagaattatatcaatggctatatgacttccacaatcgcatggaatttagtggctagttactatgaacagttgccttatgggagatgcgggttgatgacggcccaggagccatggagtgggcactacgtggtagaatctcctgtctgggtatcagctcataccactcagtttactcaacctggctggtattacctgaagacagttggccatttagagaaaggaggaagctacgtagctctgactgatggcttagggaacctcaccatcatcattgaaaccatgagtcataaacattctaagtgcatacggccatttcttccttatttcaatgtgtcacaacaatttgccacctttgttcttaagggatcttttagtgaaataccagagctacaggtatggtataccaaacttggaaaaacatccgaaagatttctttttaagcagctggattctctatggctccttgacagcgatggcagtttcacactgagcctgcatgaagatgagctgttcacactcaccactctcaccactggtcgcaaaggcagctacccgcttcctccaaaatcccagcccttcccaagtacctataaggatgatttcaatgttgattacccattttttagtgaagctccaaactttgctgatcaaactggtgtatttgaatattttacaaatattgaagaccctggcgagcatcacttcacgctacgccaagttctcaaccagagacccattacgtgggctgccgatgcatccaacacaatcagtattataggagactacaactggaccaatctgactacaaagtgtgatgtttacatagagacccctgacacaggaggtgtgttcattgcaggaagagtaaataaaggtggtattttgattagaagtgccagaggaattttcttctggatttttgcaaatggatcttacagggttacaggtgatttagctggatggattatatatgctttaggacgtgttgaagttacagcaaaaaaatggtatacactcacgttaactattaagggtcatttcgcctctggcatgctgaatgacaagtctctgtggacagacatccctgtgaattttccaaagaatggctgggctgcaattggaactcactcctttgaatttgcacagtttgacaactttcttgtggaagccacacgc

SEQ ID NO: 5384 - DNA, 1413 bp, Homo Sapiens; identical to SEQ ID NO: 4962

SEQ ID NO: 5385 - DNA, 498 bp, Homo Sapiens
cagggccagtatgacctggacccgctgccgccgttccctgaccacgtccagtacacccactatagcgaccagatcgacaacccagactactatgattatcaagaggtgactcctcggccctccgaggaacagttccagttccagtcccagcagcaagtccaacaggaagtcatcccagccccaaccccagaaccaggaaatgcagagctggagcccacagagcctgggcctcttgactgccgtgaggaacagtacccgtgcacccgcctctactccatacacaggccttgcaaacagtgtctcaacgaggtctgcttctacagcctccgccgtgtgtacgtcattaacaaggagatctgtgttcgtacagtgtgtgcccacgaggagctcctccgagctgacctctgtcgggacaagttctccaaatgtggcgtgatggccagcagcggcctgtgccaatccgtggcggcctcctgtgccaggagctgtgggagctgc

SEQ ID NO: 5386 - DNA, 294 bp, Homo Sapiens
gaggcccaggaaggaaccctgagccccccaccaaagctaaagatgagtcgctggagcctggtgaggggcaggatgaaggagctgctggagacagtggtgaacaggaccagagacgggtggcaatggttctggagcccgagcaccttccggggcttcatgcagacctactatgacgaccacctgagggacctgggtccgctcaccaaggcctggttcctcgaatccaaagacagcctcttgaagaagacccacagcctgtgccccaggcttgtctgtggggacaaggaccagggt

SEQ ID NO: 5387 - DNA, 1428 bp, Homo Sapiens
gagttcccaggctgcaagatccgcgtcacctccaaggcgctggagctggtgaagcaggaggggctgcgctttctggagcaagagctggagactatcaccattccggacctgcggggcaaagaaggccacttctactacaacatctctgaggtgaaggtcacagagctgcaactgacatcttccgagctcgatttccagccacagcaggagctgatgcttcaaatcaccaatgcctccttggggctgcgcttccggagacagctgctctactggttcttctatgatgggggctacatcaacgcctcagctgagggtgtgtccatccgcactggtctggagctctcccgggatcccgctggacggatgaaagtgtccaatgtctcctgccaggcctctgtctccagaatgcacgcggccttcgggggaaccttcaagaaggtgtatgattttctctccacgttcatcacctcagggatgcgcttcctcctcaaccagcagatctgccctgtcctctaccacgcagggacggtcctgctcaactccctcctggacaccgtgcctgtgcgcagttctgtggacgagcttgttggcattgactattccctcatgaaggatcctgtggcttccaccagcaacctggacatggacttccggggggccttcttccccctgactgagaggaactggagcctccccaaccgggcagtggagccccagctgcaggaggaagagcggatggtgtatgtggccttctctgagttcttcttcgactctgccatggagagctacttccgggcgggggccctgcagctgttgctggtgggggacaaggtgccccacgacctggacatgctgctgagggccacctactttgggagcattgtcctgctgagcccagcagtgattgactccccattgaagctggagctgcgggtcctggccccaccgcgctgcaccatcaagccctctggcaccaccatctctgtcactgctagcgtcaccattgccctggtcccaccagaccagcctgaggtccagctgtccagcatgactatggacgcccgtctcagcgccaagatggctctccgggggaaggccctgcgcacgcagctggacctgcgcaggttccgaatctattccaaccattctgcactggagtcgctggctctgatcccattacaggcccctctgaagaccatgctgcagattggggtgatgcccatgctcaatgagcggacctggcgtggggtgcagatcccactacctgagggcatcaactttgtgcatgaggtggtgacgaaccatgcgggattcctcaccatcggggctgatctccactttgccaaagggctgcgagaggtgattgagaagaaccggcctgctgatgtcagggcgtccactgcccccacaccgtccacagcagctgtc

SEQ ID NO: 5388 - DNA, 702 bp, Homo Sapiens
gtctccgggatccgaggagatgctctggagaggttttgccttcagcaacccctggactgtgacgacatctatgcccagggctaccagtcagacggcgtgtacctcatctacccctcgggccccagtgtgcctgtgcccgtcttctgtgacatgaccaccgagggcgggaagtggacggttttccagaagagattcaatggctcagtaagtttcttccgcggctggaatgactacaagctgggcttcggccgtgctgatggagagtactggctggggctgcagaacatgcacctcctgacactgaagcagaagtatgagctgcgagtggacttggaggactttgagaacaacacggcctatgccaagtacgctgacttctccatctccccgaacgcggtcagcgcagaggaggatggctacaccctctttgtggcaggctttgaggatggcggggtaggtgactccctgtcctaccacagtggccagaagttctctaccttcgaccgggaccaggacctctttgtgcagaactgcgcagctctctcctcaggagccttctggttccgcagctgccactttgccaacctcaatggcttctacctaggtggctcccacctctcttatgccaatggcatcaactgggcccagtggaagggcttctactactccctcaaacgcactgagatgaaaatccgccgggcc

SEQ ID NO: 5389 - DNA, 348 bp, Homo Sapiens
ggcatcgactgccaaggagggtccaggatgtgctgtcgacaagagttttttgtggacttccgtgagattggctggcacgactggatcatccagcctgagggctacgccatgaacttctgcatagggcagtgcccactacacatagcaggcatgcctggtattgctgcctcctttcacactgcagtgctcaatcttctcaaggccaacacagctgcaggcaccactggagggggctcatgctgtgtacccacggcccggcgccccctgtctctgctctattatgacagggacagcaacattgtcaagactgacatacctgacatggtagtagaggcctgtgggtgcagt

SEQ ID NO: 5390 - DNA, 474 bp, Homo Sapiens
ctgcggccgggcgactgcgaagtttgtatttcttatctgggaagattttaccaggacctcaaagacagagatgtcacattctcaccagccactattgaaaacgaacttataaagttctgccgggaagcaagaggcaaagagaatcggttgtgctactatatcggggccacagatgatgcagccaccaaaatcatcaatgaggtatcaaagcctctggcccaccacatccctgtggagaagatctgtgagaagcttaagaagaaggacagccagatatgtgagcttaagtatgacaagcagatcgacctgagcacagtggacctgaagaagctccgagttaaagagctgaagaagattctggatgactggggggagacatgcaaaggctgtgcagaaaagtctgactacatccggaagataaatgaactgatgcctaaatatgcccccaaggcagccagtgcacggaccgatttg

SEQ ID NO: 5391 - DNA, 408 bp, Homo Sapiens
caaagagactttgatttggcagatgcccttgatgaccctgaacccaccaagaagccaaactcagatatctacccaaagccaaaaccaccttactacccacagcccgagaatcccgacagcggtggaaatatctacccaaggccaaagccacgccctcaaccccagcctggcaattccggcaacagtggaggttacttcaatgatgtggaccgtgatgacggacgctacccgcccaggcccaggccacggccgcctgcaggaggtggcggcggtggctactccagttatggcaactccgacaacacgcacggaagagggggctatagacccaactctcgttatggaaatacttatggtggagatcaccattcaacgtatggcaatccagaaggcaatatggtagcaaaa

SEQ ID NO: 5392 - DNA, 837 bp, Homo Sapiens
ttgcacgagaaggcttaccaggtacgggacacagccattgagtcctcggtggtaaccaaggtgaagggctccggactctacgccaacagagtcatggatgtgtctgattacgtgacgccacctcagggcacctcggtctttgtcatcatcaccaagatgattgttactgaaaatcagatgcaaggattctgcccagagagtgaggagaaataccgctgtgtatcagacagccagtgcgggcctgagcgcttgccaggtggggggatcctcactggccgctgcgtgaactacagctctgtgctccggacctgtgagatccagggctggtgccccacggaggtggacacagtggaaacgcccatcatgatggaagctgagaacttcactattttcatcaagaacagcatccgtttccccctcttcaactttgagaagggaaacctccttcccaacctgacagccagggacatgaagacctgccgcttccacccggacaaggaccctttctgccccatcttgcgggtaggggacgtggtcaagtttgcggggcaggattttgccaaactggcgcgcacggggggagttctgggcattaagatcggctgggtgtgcgacttggacaaggcctgggaccagtgcatccccaaatactccttcacccggctcgacagcgtttctgagaaaagcagcgtgtccccaggctacaacttcaggtttgccaagtactacaaaatggaaaatggcagtgagtaccgcaccctcctgaaggcttttggcatccgcttcgacgtgctggtatacgggaatgctggcaagttcaacatcatccccaccatc

SEQ ID NO: 5393 - DNA, 1002 bp, Homo Sapiens
agctacccgatctggtggtcgctggctgttgggccacagtattcctccctgggctcgcagcccatcctgtgtgccagcatcccgggcctggtccccaagcagctccgcttctgcaggaactacgtggagatcatgcccagcgtggccgagggcatcaagattggcatccaggagtgccagcaccagttccgcggccgccggtggaactgcaccaccgtccacgacagcctggccatcttcgggcccgtgctggacaaagctaccagggagtcggcctttgtccacgccattgcctcagccggtgtggcctttgcagtgacacgctcatgtgcagaaggcacggccgccatctgtggctgcagcagccgccaccagggctcaccaggcaagggctggaagtggggtggctgtagcgaggacatcgagtttggtgggatggtgtctcgggagttcgccgacgcccgggagaaccggccagatgcccgctcagccatgaaccgccacaacaacgaggctgggcgccaggccatcgccagccacatgcacctcaagtgcaagtgccacgggctgtcgggcagctgcgaggtgaagacatgctggtggtcgcaacccgacttccgcgccatcggtgacttcctcaaggacaagtacgacagcgcctcggagatggtggtggagaagcaccgggagtcccgcggctgggtggagaccctgcggccgcgctacacctacttcaaggtgcccacggagcgcgacctggtctactacgaggcctcgcccaacttctgcgagcccaaccctgagacgggctccttcggcacgcgcgaccgcacctgcaacgtcagctcgcacggcatcgacggctgcgacctgctgtgctgcggccgcggccacaacgcgcgagcggagcggcgccgggagaagtgccgctgcgtgttccactggtgctgctacgtcagctgccaggagtgcacgcgcgtctacgacgtgcacacctgcaag

SEQ ID NO: 5394 - DNA, 987 bp, Homo Sapiens
agcaactggctgtacctggccaagctgtcgtcggtggggagcatctcagaggaggagacgtgcgagaaactcaagggcctgatccagaggcaggtgcagatgtgcaagcggaacctggaagtcatggactcggtgcgccgcggtgcccagctggccattgaggagtgccagtaccagttccggaaccggcgctggaactgctccacactcgactccttgcccgtcttcggcaaggtggtgacgcaagggactcgggaggcggccttcgtgtacgccatctcttcggcaggtgtggcctttgcagtgacgcgggcgtgcagcagtggggagctggagaagtgcggctgtgacaggacagtgcatggggtcagcccacagggcttccagtggtcaggatgctctgacaacatcgcctacggtgtggctttctcacagtcgtttgtggatgtgcgggagagaagcaagggggcctcgtccagcagagccctcatgaacctccacaacaatgaggccggcaggaaggccatcctgacacacatgcgggtggaatgcaagtgccacggggtgtcaggctcctgtgaggtaaagacgtgctggcgagccgtgccgcccttccgccaggtgggtcacgcactgaaggagaagtttgatggtgccactgaggtggagccacgccgcgtgggctcctccagggcactggtgccacgcaacgcacagttcaagccgcacacagatgaggacctggtgtacttggagcctagccccgacttctgtgagcaggacatgcgcagcggcgtgctgggcacgaggggccgcacatgcaacaagacgtccaaggccatcgacggctgtgagctgctgtgctgtggccgcggcttccacacggcgcaggtggagctggctgaacgctgcagctgcaaattccactggtgctgcttcgtcaagtgccggcagtgccagcggctcgtggagttgcacacgtgccga

SEQ ID NO: 5395 - DNA, 975 bp, Homo Sapiens
gcactgtcatccgtggtggccctgggagccaacatcatctgcaacaagattcctggcctagccccgcggcagcgtgccatctgccagagtcggcccgatgccatcattgtgattggggagggggcgcagatgggcatcaacgagtgccagtaccagttccgcttcggacgctggaactgctctgccctcggcgagaagaccgtcttcgggcaagagctccgagtagggagccgtgaggctgccttcacgtacgccatcaccgcggctggcgtggcgcacgccgtcaccgctgcctgcagccaagggaacctgagcaactgcggctgcgaccgcgagaagcagggctactacaaccaagccgagggctggaagtggggcggctgctcggccgacgtgcgttacggcatcgacttctcccggcgcttcgtggacgctcgggagatcaagaagaacgcgcggcgcctcatgaacctgcataacaatgaggccggcaggaaggttctagaggaccggatgcagctggagtgcaagtgccacggcgtgtctggctcctgcaccaccaaaacctgctggaccacgctgcccaagttccgagaggtgggccacctgctgaaggagaagtacaacgcggccgtgcaggtggaggtggtgcgggccagccgtctgcggcagcccaccttcctgcgcatcaaacagctgcgcagctatcagaagcccatggagacagacctggtgtacattgagaagtcgcccaactactgcgaggaggacgcggccacgggcagcgtgggcacgcagggccgtctctgcaaccgcacgtcgcccggcgcggacggctgtgacaccatgtgctgcggccgaggctacaacacccaccagtacaccaaggtgtggcagtgcaactgcaaattccactggtgctgcttcgtcaagtgcaacacctgcagcgagcgcaccgaggtcttcacctgcaag

SEQ ID NO: 5396 - DNA, 159 bp, Homo Sapiens
cagtggagagtgtcggccttcattgaaaacaacatcgtggtttttgaaaacttctgggaaggactgtggatgaattgcgtgaggcaggctaacatcaggatgcagtgcaaaatctatgattccctgctggctctttctccggacctacaggcagccaga

SEQ ID NO: 5397 - DNA, 168 bp, Homo Sapiens
aactggagaaaattacgattgatcacattcaacagaaacgagaagaacctgactgtttacacaggcctgtgggtgaaatgtgcccggtatgacgggagcagtgactgcctgatgtacgacactacttggtactcatcagttgaccagctggacctgcgtgtcctccag

SEQ ID NO: 5398 - DNA, 159 bp, Homo Sapiens
cagtggagagtatcagcttttgttggcagcaacattattgtctttgagaggctctgggaagggctctggatgaattgcatccgacaagccagggtccggttgcaatgcaagttctatagctccttgttggctctcccgcctgccctggaaacagcccgg

SEQ ID NO: 5399 - DNA, 1308 bp, Homo Sapiens
acccagcacggcatccggctgcccctgcgcagcggcctggggggcgcccccctggggctgcggctgccccgggagaccgacgaagagcccgaggagcccggccggaggggcagctttgtggagatggtggacaacctgaggggcaagtcggggcagggctactacgtggagatgaccgtgggcagccccccgcagacgctcaacatcctggtggatacaggcagcagtaactttgcagtgggtgctgccccccaccccttcctgcatcgctactaccagaggcagctgttcagcacataccgggacctccggaagggtgtgtatgtgccctacacccagggcaagtgggaaggggagctgggcaccgacctggtaagcatcccccatggccccaacgtcactgtgcgtgccaacattgctgccatcactgaatcagacaagttcttcatcaacggctccaactgggaaggcatcctggggctggcctatgctgagattgccaggcctgacgactccctggagcctttctttgactctctggtaaagcagacccacgttcccaacctcttctccctgcagctttgtggtgctggcttccccctcaaccagtctgaagtgctggcctctgtcggagggagcatgatcattggaggtatcgaccactcgctgtacacaggcagtctctggtatacacccatccggcgggagtggtattatgaggtgatcattgtgcgggtggagatcaatggacaggatctgaaaatggactgcaaggagtacaactatgacaagagcattgtggacagtggcaccaccaaccttcgtttgcccaagaaagtgtttgaagctgcagtcaaatccatcaaggcagcctcctccacggagaagttccctgatggtttctggctaggagagcagctggtgtgctggcaagcaggcaccaccccttggaacattttcccagtcatctcactctacctaatgggtgaggttaccaaccagtccttccgcatcaccatccttccgcagcaatacctgcggccagtggaagatgtggccacgtcccaagacgactgttacaagtttgccatctcacagtcatccacgggcactgttatgggagctgttatcatggagggcttctacgttgtctttgatcgggcccgaaaacgaattggctttgctgtcagcgcttgccatgtgcacgatgagttcaggacggcagcggtggaaggcccttttgtcaccttggacatggaagactgtggctacaacattccacagacagatgagtcaaccctcatgacc

SEQ ID NO: 5400 - DNA, 366 bp, Homo Sapiens
aaagaagtttcttggagagaattcatgaaacagcactacttaagtccaagtcgagaattcagagagtacaaatgtgatgtcctcatgagagaaaatgaagctctgaaagacaagagctctcacatgtttatctatatctcatggtacaaaatcgagcatatatgcactagtgacaactggatggatcgcttccgaaatgcatatgtatgggtccagaatcctctcaaagtactcaagtgtcaccaggagaattccaaaaatagctacacagagagcaggagcttcaactacattgaattccattgtagcatggacgggtatgttgatagcatagaagacctaaagatggtagaacctatcggcaac

SEQ ID NO: 5401 - DNA, 159 bp, Homo Sapiens
gacatgtggagcacccaggacctgtacgacaaccccgtcacctccgtgttccagtacgaagggctctggaggagctgcgtgaggcagagttcaggcttcaccgaatgcaggccctatttcaccatcctgggacttccagccatgctgcaggcagtgcga

SEQ ID NO: 5402 - DNA, 159 bp, Homo Sapiens
aactggaaggtgaatgtggatgtggactccaacatcataacagccattgtacagctgcacgggctctggatggactgtacgtggtacagcactgggatgttcagctgtgccctgaaacactccattctgtccctccccatccacgtgcaggctgcgaga

SEQ ID NO: 5403 - DNA, 687 bp, Homo Sapiens
atgcgaaaggtggttttgatcaccggggctagcagtggcattggcctggccctctgcaagcggctgctggcggaagatgatgagcttcatctgtgtttggcgtgcaggaacatgagcaaggcagaagctgtctgtgctgctctgctggcctctcaccccactgctgaggtcaccattgtccaggtggatgtcagcaacctgcagtcggtcttccgggcctccaaggaacttaagcaaaggtttcagagattagactgtatatatctaaatgctgggatcatgcctaatccacaactaaatatcaaagcacttttctttggcctcttttcaagaaaagtgattcatatgttctccacagctgaaggcctgctgacccagggtgataagatcactgctgatggacttcaggaggtgtttgagaccaatgtctttggccattttatcctgattcgggaactggagcctctcctctgtcacagtgacaatccatctcagctcatctggacatcatctcgcagtgcaaggaaatctaatttcagcctcgaggacttccagcacagcaaaggcaaggaaccctacagctcttccaaatatgccactgaccttttgagtgtggctttgaacaggaacttcaaccagcagggtctctattccaatgtggcctgtccaggtacagcattgaccaat

SEQ ID NO: 5404 - DNA, 1152 bp, Homo Sapiens
cacttcgactgctcagggaagtacagatgtcgctcatcctttaagtgtatcgagctgatagctcgatgtgacggagtctcggattgcaaagacggggaggacgagtaccgctgtgtccgggtgggtggtcagaatgccgtgctccaggtgttcacagctgcttcgtggaagaccatgtgctccgatgactggaagggtcactacgcaaatgttgcctgtgcccaactgggtttcccaagctatgtaagttcagataacctcagagtgagctcgctggaggggcagttccgggaggagtttgtgtccatcgatcacctcttgccagatgacaaggtgactgcattacaccactcagtatatgtgagggagggatgtgcctctggccacgtggttaccttgcagtgcacagcctgtggtcatagaaggggctacagctcacgcatcgtgggtggaaacatgtccttgctctcgcagtggccctggcaggccagccttcagttccagggctaccacctgtgcgggggctctgtcatcacgcccctgtggatcatcactgctgcacactgtgtttatgacttgtacctccccaagtcatggaccatccaggtgggtctagtttccctgttggacaatccagccccatcccacttggtggagaagattgtctaccacagcaagtacaagccaaagaggctgggcaatgacatcgcccttatgaagctggccgggccactcacgttcaatgaaatgatccagcctgtgtgcctgcccaactctgaagagaacttccccgatggaaaagtgtgctggacgtcaggatggggggccacagaggatggaggtgacgcctcccctgtcctgaaccacgcggccgtccctttgatttccaacaagatctgcaaccacagggacgtgtacggtggcatcatctccccctccatgctctgcgcgggctacctgacgggtggcgtggacagctgccagggggacagcggggggcccctggtgtgtcaagagaggaggctgtggaagttagtgggagcgaccagctttggcatcggctgcgcagaggtgaacaagcctggggtgtacacccgtgtcacctccttcctggactggatccacgagcagatggagagagacctaaaaacc

SEQ ID NO: 5405 - DNA, 159 bp, Homo Sapiens
agctggaaaacaagttcttatgtcggtgccagcattgtgacagcagttggcttctccaagggcctctggatggaatgtgccacacacagcacaggcatcacccagtgtgacatctatagcacccttctgggcctgcccgctgacatccaggctgcccag

SEQ ID NO: 5406 - DNA, 198 bp, Homo Sapiens
tcagaagctgctagtctgtctccaaaaaaagtggactgcagcatttacaagaagtatccagtggtggccatcccctgccccatcacatacctaccagtttgtggttctgactacatcacctatgggaatgaatgtcacttgtgtaccgagagcttgaaaagtaatggaagagttcagtttcttcacgatggaagttgc

SEQ ID NO: 5407 - DNA, 342 bp, Homo Sapiens
acccccacctgtgagcctgcgacccccttatgttgcaggcgagaccattacgtagacttccaggaactgggatggcgggactggatactgcagcccgaggggtaccagctgaattactgcagtgggcagtgccctccccacctggctggcagcccaggcattgctgcctctttccattctgccgtcttcagcctcctcaaagccaacaatccttggcctgccagtacctcctgttgtgtccctactgcccgaaggcccctctctctcctctacctggatcataatggcaatgtggtcaagacggatgtgccagatatggtggtggaggcctgtggctgcagc

SEQ ID NO: 5408 - DNA, 258 bp, Homo Sapiens
gctgtgatcacaggggcctgtgagcgggatgtccagtgtggggcaggcacctgctgtgccatcagcctgtggcttcgagggctgcggatgtgcaccccgctggggcgggaaggcgaggagtgccaccccggcagccacaagatccccttcttcaggaaacgcaagcaccacacctgtccttgcttgcccaacctgctgtgctccaggttcccggacggcaggtaccgctgctccatggacttgaagaacatcaatttt

SEQ ID NO: 5409 - DNA, 750 bp, Homo Sapiens
gccaatttaacgaacggtggaaagtcagaacttctgaaatcaggaagcagcaaatccacactaaagcacatatggacagaaagcagcaaagacttgtctatcagccgactcctgtcacagacttttcgtggcaaagagaatgatacagatttggacctgagatatgacaccccagaaccttattctgagcaagacctctgggactggctgaggaactccacagaccttcaagagcctcggcccagggccaagagaaggcccattgttaaaacgggcaagtttaagaaaatgtttggatggggcgattttcattccaacatcaaaacagtgaagctgaacctgttgataactgggaaaattgtagatcatggcaatgggacatttagtgtttatttcaggcataattcaactggtcaagggaatgtatctgtcagcttggtaccccctacaaaaatcgtggaatttgacttggcacaacaaaccgtgattgatgccaaagattccaagtcttttaattgtcgcattgaatatgaaaaggttgacaaggctaccaagaacacactctgcaactatgacccttcaaaaacctgttaccaggagcaaacccaaagtcatgtatcctggctctgctccaagccctttaaggtgatctgtatttacatttccttttatagtacagattataaactggtacagaaagtgtgccctgactacaactaccacagtgacacaccttactttccctcggga

SEQ ID NO: 5410 - DNA, 618 bp, Homo Sapiens
gagctcattccagatgcacccctgtccagtgctgcctatagcatccgcagcatcggggagaggcctgtcctcaaagctccagtccccaaaaggcaaaaatgtgaccactggactccctgcccatctgacacctatgcctacaggttactcagcggaggtggcagaagcaagtacgccaaaatctgctttgaggataacctacttatgggagaacagctgggaaatgttgccagaggaataaacattgccattgtcaactatgtaactgggaatgtgacagcaacacgatgttttgatatgtatgaaggcgataactctggaccgatgacaaagtttattcagagtgctgctccaaaatccctgctcttcatggtgacctatgacgacggaagcacaagactgaataacgatgccaagaatgccatagaagcacttggaagtaaagaaatcaggaacatgaaattcaggtctagctgggtatttattgcagcaaaaggcttggaactcccttccgaaattcagagagaaaagatcaaccactctgatgctaagaacaacagatattctggctggcctgcagagatccagatagaaggctgcatacccaaagaacgaagc

SEQ ID NO: 5411 - DNA, 813 bp, Homo Sapiens
ctcaccgacttctctggttacctaaccaaactcctgcaaaaccacaccacctatgcctgtgatggggactatttgaatctacagtgccctcggcattctacgataagtgtccaatcggcattttatgggcaagattaccaaatgtgtagttcccagaagcctgcctcccagagggaagacagcttaacctgtgtggcagccaccaccttccagaaggtgctggacgaatgccagaaccagcgggcctgccacctcctggtcaatagccgtgtttttggacctgacctttgtccaggaagcagtaaatacctcctggtctcctttaaatgccaacctaatgaattaaaaaacaaaaccgtgtgtgaagaccaggagctgaaactgcactgccatgaatccaagttcctcaacatctactctgcgacctacggcaggaggacccaggaaagggacatctgctcctccaaggcagagcggctcccccctttcgattgcttgtcttactcagctttgcaagtcctatcccgaaggtgctatgggaagcagagatgcaaaatcatcgtcaacaatcaccattttggaagcccctgtttgccaggcgtgaaaaaatacctcactgtgacctacgcatgtgttcccaagaacatactcacagcgattgatccagccattgctaatctaaaaccttctttgaagcagaaagatggtataaacttcgacccaagcggatcgaaggttctgaggaaagatggaattcttgttagcaactctctggcagcctttgcttacattagagcccacccggagagagct

SEQ ID NO: 5412 - DNA, 168 bp, Homo Sapiens; identical to SEQ ID NO: 3441

SEQ ID NO: 5413 - DNA, 1368 bp, Homo Sapiens
tgccaggagctgctagagacggtgggcacgctcgctcggattgacaaggatgaactcggcaaagccatccagaactcactggttggggagcccattctgcagaatgtgctgggatcggtcacagctgtgaaccggggcctcttgggctcaggagggctgcttggaggaggcggcttgctgggccacggaggggtttttggcgttgtcgaggagctctctggtctgaagattgaggagctcacgctgccaaaggtgttgctgaagctgctgccgggatttggggtgcagctgagcctgcacaccaaagtgggcatgcattgctctggcccccttggtggccttctgcagctggctgcggaggtgaacgtgacatcgcgggtggcgctggccgtgagctcaaggggcacacccatccttatcctcaagcgctgcagcacgctcctgggccacatcagcctgttctcagggctgctgcccacaccactctttggggtcgtggaacagatgctcttcaaggtgcttccgggactgctgtgccccgtggtggacagtgtgctgggtgtggtgaatgagctcctgggggctgtgctgggcctggtgtcccttggggctcttgggtccgtggaattctctctggccacattgcctctcatctccaaccagtacatagaactggacatcaaccctatcgtgaagagtgtagctggtgatatcattgacttccccaagtcccgtgccccagccaaggtgccccccaagaaggaccacacatcccaggtgatggtgccactgtacctcttcaacaccatgtttggactcctgcagaccaacggcgccctcgacatggacatcacccctgagctggttcccagcgatgtcccactgacaactacagacctggcagctttgctccctgaggccctggggaagctgcccctgcaccagcaactcctactgttcctgcgggtgagggaagctcccacggtcacactccacaacaagaaggccttggtctccctcccagccaacatccatgtgctgttctatgtccctaaggggacccctgaatccctctttgagctgaactccgtcatgactgtgcgtgcccagctggctccctcggctaccaagctgcacatctccctgtccctggaacggctcagtgtcaaggtggcctcctcctttacccatgcctttgacggatcgcgtttagaagaatggctcagccatgtggtcggggcagtgtatgcaccaaagcttaacgtggccctggatgttggaatttccctgcctaaggttcttaatatcaatttttccaattcagttctggagatcgtagagaatgctgttgtgctgaccgtggcatcc

SEQ ID NO: 5414 - DNA, 537 bp, Homo Sapiens
caagaggtggatacagattttgatttcccagaagaagataaaaaagaagaatttgaagagtgtttggaaaaattttttagtacagggcccgccagaccacctaccaaagaaaaagtcaaaagacgtgtccttattgaacctggaatgccactaaatcatatagagtactgtaaccatgaaatcatgggaaaaaatgtttactacaaacaccgttgggtggcagaacattacttccttcttatgcaatatgacgagctccaaaaaatctgttacaacagatttgtgccatgtaagaatggaattaggaaatgtaacaggagcaaaggtcttgtagaaggagtgtattgtaatttaacagaagcatctgaaataccagcgtgtaaatacgaatcactttataggaagggctacgtccttatcacttgttcatggcaaaatgaaatgcaaaaacgtattcctcatactataaatgatctcgtggagccacctgaacacagaagtttcctcagtgaggatggtgtctttgtcataccgccc

SEQ ID NO: 5415 - DNA, 1389 bp, Homo Sapiens
gcctaccgccatcctgatttcccgttattggaaaaagctcagcaactgctccaaagtacaggatccccttactccaccaattgctggttatgtactagctcttccactgaaacaccagggacagcttatccagcctcgcccagagaatggacaagcatagaggcggaattacatatttcctatcgatgggaccctaatctgaaaggactgatgaggcctgcaaatagtcttctttcaacagtaaagcaagatttccctgatatccgccagaaacctcccattttcggacccatctttactaatatcaacctaatgggaatagcccctatttgtgttatggccaaaaggaaaaatggaacaaatgtaggcactcttccaagtacagtctgtaatgttactttcactgtagattctaaccaacagacttaccaaacatacacccacaaccaattccgccatcaaccaagattccccaaacctccaaatattacttttcctcagggaactttgctagataaatccagccggttttgccagggacgcccaagctcatgcagtactcgaaacttctggttccggcctgctgattataaccaatgtctgcaaatttccaacctcagctctacagcggaatgggttctattggaccaaactcgaaattctcttttttgggaaaataaaaccaagggagctaaccagagccaaacaccctgcgtccaagtcttagcaggcatgactatagccaccagctacctgggcatatcagcagtctcagaattttttggaacctccctcacccccttatttcatttccatatctctacatgccttaaaactcaaggagccttttatatttgtggccagtcgattcaccaatgcctccccagtaactggactggaacttgtaccataggctatgtaaccccagacatcttcatagcccctggcaatctctctcttccaataccaatctatgggaattccccgttgcccagggtgaggagggcaatccatttcattccccttctcgcgggactcggcattctagctggtacgggaaccggaattgctggaatcacaaaagcttccctcacctatagccagctctcaaaggaaatagccaacaacattgacaccatggctaaagccttaacgaccatgcaagaacaaatcgactctttagcagccgtagtccttcaaaatcgtcgaggactagacatgttaacggcagcacagggaggaatttgtttggccttagatgaaaaatgttgcttttgggtaaatcaatcaggaaaagtacaagacaacatcagacaactcctaaatcaagcctccagtttacgggaacgagccactcagggttggttaaattgggaaggaacttggaaa

SEQ ID NO: 5416 - DNA, 705 bp, Homo Sapiens
tggcccgggctgcccaggaggccctgtgtgcactgctgccgcccggcctggccccctggaccctatgcccgggtgagtgacagggacctgtggaggggggacctgtggagggggctgcctcgagtacggcccactatagacatcgaaatcctcaaaggtgagaagggtgaggccggcgtccgaggtcgggccggcaggagcgggaaagaggggccgccaggcgcccggggcctgcagggccgcagaggccagaaggggcaggtggggccgccgggcgccgcgtgccgacgtgcctacgccgccttctccgtgggccggcgcgagggcctgcacagctccgaccacttccaggcggtgcccttcgacacggagctggtgaacctggacggcgccttcgacctggccgcgggccgcttcctctgcacggtgcccggcgtctacttcctcagcctcaacgtgcacacctggaactacaaggagacctacctgcacatcatgctgaaccggcggcccgcggccgtgctctacgcgcagcccagcgagcgcagcgtcatgcaggcccagagcctgatgctgctgctggcggcgggcgacgccgtctgggtgcgcatgttccagcgcgaccgggacaacgccatctacggcgagcacggagacctctacatcaccttcagcggccacctggtcaagccggccgccgagctg

SEQ ID NO: 5417 - DNA, 231 bp, Homo Sapiens
gccaccctgggtggtcctgaggaagaaagcaccattgagaattatgcgtcacgacccgaggcctttaacaccccgttcctgaacatcgacaaattgcgatctgcgtttaaggctgatgagttcctgaactggcacgccctctttgagtctatcaaaaggaaacttcctttcctcaactgggatgcctttcctaagctgaaaggactgaggagcgcaactcctgatgcccag

SEQ ID NO: 5418 - DNA, 318 bp, Homo Sapiens
gtagatgtaacaacaacagaggcctttgattctggagtcatagatgtgcagtcaacacccacagtcagggaagagaaatcagccactgacctgacagcaaaactcttgcttcttgatgaattggtgtccctagaaaatgatgtgattgagacaaagaagaaaaggagtttctctggttttgggtctccccttgacagactctcagctggctctgtagatcacaaaggtaaacagaggaaagtagtagatcatccaaaaaggcgatttggtatccccatggatcggattggtagaaaccggctttcaaattccagaggc

SEQ ID NO: 5419 - DNA, 390 bp, Homo Sapiens
aaggtctttgaaaggtgtgagttggccagaactctgaaaagattgggaatggatggctacaggggaatcagcctagcaaactggatgtgtttggccaaatgggagagtggttacaacacacgagctacaaactacaatgctggagacagaagcactgattatgggatatttcagatcaatagccgctactggtgtaatgatggcaaaaccccaggagcagttaatgcctgtcatttatcctgcagtgctttgctgcaagataacatcgctgatgctgtagcttgtgcaaagagggttgtccgtgatccacaaggcattagagcatgggtggcatggagaaatcgttgtcaaaacagagatgtccgtcagtatgttcaaggttgtggagtg

SEQ ID NO: 5420 - DNA, 396 bp, Homo Sapiens
gaaccggtgcagttcaaggactgcggttctgtggatggagttataaaggaagtgaatgtgagcccatgccccacccaaccctgccagctgagcaaaggacagtcttacagcgtcaatgtcaccttcaccagcaatattcagtctaaaagcagcaaggccgtggtgcatggcatcctgatgggcgtcccagttccctttcccattcctgagcctgatggttgtaagagtggaattaactgccctatccaaaaagacaagacctatagctacctgaataaactaccagtgaaaagcgaatatccctctataaaactggtggtggagtggcaacttcaggatgacaaaaaccaaagtctcttctgctgggaaatcccagtacagatcgtttctcatctc

SEQ ID NO: 5421 - DNA, 429 bp, Homo Sapiens
gtgtggttgggaagactggaccctgagcagcttcttgggccctggtacgtgcttgcggtggcctcccgggaaaagggctttgccatggagaaggacatgaagaacgtcgtgggggtggtggtgaccctcactccagaaaacaacctgcggacgctgtcctctcagcacgggctgggagggtgtgaccagagtgtcatggacctgataaagcgaaactccggatgggtgtttgagaatccctcaataggcgtgctggagctctgggtgctggccaccaacttcagagactatgccatcatcttcactcagctggagttcggggacgagcccttcaacaccgtggagctgtacagtctgactgagacagccagccaggaggccatggggctcttcaccaagtggagcaggagcctgggcttcctgtcacag

SEQ ID NO: 5422 - DNA, 492 bp, Homo Sapiens
gtcaaccccaccgtgttcttcgacattgccgtcgacggcgagcccttgggccgcgtctcctttgagctgtttgcagacaaggtcccaaagacagcagaaaattttcgtgctctgagcactggagagaaaggatttggttataagggttcctgctttcacagaattattccagggtttatgtgtcagggtggtgacttcacacgccataatggcactggtggcaagtccatctatggggagaaatttgaagatgagaacttcatcctaaagcatacgggtcctggcatcttgtccatggcaaatgctggacccaacacaaatggttcccagtttttcatctgcactgccaagactgagtggttggatggcaagcatgtggtgtttggcaaagtgaaagaaggcatgaatattgtggaggccatggagcgctttgggtccaggaatggcaagaccagcaagaagatcaccattgctgactgtggacaactcgaa

SEQ ID NO: 5423 - DNA, 969 bp, Homo Sapiens
agcagcgaggccgagacccagcagccgcccgccgccccccccgccgcccccgccctcagcgccgccgacaccaagcccggcactacgggcagcggcgcagggagcggtggcccgggcggcctcacatcggcggcgcctgccggcggggacaagaaggtcatcgcaacgaaggttttgggaacagtaaaatggttcaatgtaaggaacggatatggtttcatcaacaggaatgacaccaaggaagatgtatttgtacaccagactgccataaagaagaataaccccaggaagtaccttcgcagtgtaggagatggagagactgtggagtttgatgttgttgaaggagaaaagggtgcggaggcagcaaatgttacaggtcctggtggtgttccagttcaaggcagtaaatatgcagcagaccgtaaccattatagacgctatccacgtcgtaggggtcctccacgcaattaccagcaaaattaccagaatagtgagagtggggaaaagaacgagggatcggagagtgctcccgaaggccaggcccaacaacgccggccctaccgcaggcgaaggttcccaccttactacatgcggagaccctatgggcgtcgaccacagtattccaaccctcctgtgcagggagaagtgatggagggtgctgacaaccagggtgcaggagaacaaggtagaccagtgaggcagaatatgtatcggggatatagaccacgattccgcaggggccctcctcgccaaagacagcctagagaggacggcaatgaagaagataaagaaaatcaaggagatgagacccaaggtcagcagccacctcaacgtcggtaccgccgcaacttcaattaccgacgcagacgcccagaaaaccctaaaccacaagatggcaaagagacaaaagcagccgatccaccagctgagaattcgtccgctcccgaggctgagcagggcggggctgag

SEQ ID NO: 5424 - DNA, 1566 bp, Homo Sapiens
gagggcgtgcagacctgcgaagaagttcggaaacttttccagtggcggctgctgggagctgtcagggggctgccggattcgccgcgggcaggacctgatcttcaggtttgcatatccaaaaagcctacatgttgcaccaggaagatggaggagagatatcagattgcggctcgccaggatatgcagcagtttcttcaaacgtccagctctacattaaagtttctaatatctcgaaatgcggctgcttttcaagaaacccttgaaactctcatcaaacaagcagaaaattacaccagtatacttttttgcagtacctacaggaacatggccttggaggctgctgcttcggttcaggagttcttcactgatgtggggctgtatttatttggtgcggatgttaatcctgaagaatttgtaaacagattttttgacagtctttttcctctggtctacaaccacctcattaaccctggtgtgactgacagttccctggaatactcagaatgcatccggatggctcgccgggatgtgagtccatttggtaatattccccaaagagtaatgggacagatggggaggtccctgctgcccagccgcacttttctgcaggcactcaatctgggcattgaagtcatcaacaccacagactatctgcacttctccaaagagtgcagcagagccctcctgaagatgcaatactgcccgcactgccaaggcctggcgctcactaagccttgtatgggatactgcctcaatgtcatgcgaggctgcctggcgcacatggcggagcttaatccacactggcatgcatatatccggtcgttggaagaactctcggatgcaatgcatggaacatacgacattggacacgtgctgctgaactttcacttgcttgttaatgatgctgtgttacaggctcacctcaatggacaaaaattattggaacaggtaaataggatttgtggccgccctgtaagaacacccacacaaagcccccgttgttcttttgatcagagcaaagagaagcatggaatgaagaccaccacaaggaacagtgaagagacgcttgccaacagaagaaaagaatttatcaacagccttcgactgtacaggtcattctatggaggtctagctgatcagctttgtgctaatgaattagctgctgcagatggacttccctgctggaatggagaagatatagtaaaaagttatactcagcgtgtggttggaaatggaatcaaagcccagtctggaaatcctgaagtcaaagtcaaaggaattgatcctgtgataaatcagattattgataaactgaagcatgttgttcagttgttacagggtagatcacccaaacctgacaagtgggaacttcttcagctgggcagtggtggaggcatggttgaacaagtcagtggggactgtgatgatgaagatggttgcgggggatcaggaagtggagaagtcaagaggacactgaagatcacagactggatgccagatgatatgaacttcagtgatgtaaagcaaatccatcaaacagacactggcagtactttagacacaaca

SEQ ID NO: 5425 - DNA, 1074 bp, Homo Sapiens
cactaccaccatgtcaccaagctcgacgaggtggctgcctctcagcttaccttccctgctgtcacgctgtgcaacctcaacgagttccgctttagccaagtctccaagaatgacctgtatcatgctggggagctgctggccctgctcaacaacaggtatgagataccagacacacagatggcagatgaaaagcagctggagatactgcaggacaaagccaacttccgcagcttcaaacccaaacccttcaacatgcgtgagttctacgaccgagctgggcacgacattcgagacatgctgctctcctgccacttccggggggaggtctgcagcgctgaagacttcaaggtggtcttcacacgctatggaaagtgctacacgttcaactcgggccgagatgggcggccgcggctgaagaccatgaagggtgggacgggcaatgggctggaaatcatgctggacatccagcaggacgagtacctgcctgtgtggggggagactgacgagacgtccttcgaagcaggcatcaaagtgcagatccatagtcaggatgaacctcctttcatcgaccagctgggctttggcgtggccccaggcttccagacctttgtggcctgccaggagcagcggctcatctacctgcccccaccctggggcacctgcaaagctgttaccatggactcggatttggatttcttcgactcctacagcatcactgcctgccgcatcgactgtgagacgcgctacctggtggagaactgcaactgccgcatggtgcacatgccaggggatgccccatactgtactccagagcagtacaaggagtgtgcagatcctgctctggacttcctggtggagaaggaccaggagtactgcgtgtgtgaaatgccttgcaacctgacccgctatggcaaagagctgtccatggtcaagatccccagcaaagcctcagccaagtacctggccaagaagttcaacaaatctgagcaatacataggggagaacatcctggtgctggacattttctttgaagtcctcaactatgagaccattgaacagaagaaggcctatgag

SEQ ID NO: 5426 - DNA, 177 bp, Homo Sapiens
tcctccacgctgcccaccgactactggaaggtgtctaccatcgacggcacggtcatcacaaccgccacctattgggccaacctgtggaaggcgtgcgttaccgactccacgggcgtctccaactgcaaggacttcccctccatgctggcgctggacggttatatacaggcatgtaga

SEQ ID NO: 5427 - DNA, 1800 bp, Homo Sapiens
caaggtctcttaagtctccaagctaaacaggagtactgcctgaagccagaatgcatcgaagcggctgctgccatcttaagtaaagtaaatctgtctgtggatccttgtgataatttcttccggttcgcttgtgatggctggataagcaataatccaattcccgaagatatgccaagctatggggtttatccttggctgagacataatgttgacctcaagttgaaggaacttttggagaaatcaatcagtagaaggcgggacaccgaagccatacagaaagccaaaatcctttattcatcctgcatgaatgagaaagcgattgaaaaagcagatgccaagccactgctacacatcctacggcattcacctttccgctggcccgtgcttgaatctaatattggccctgaaggggtttggtcagagagaaagttcagccttctgcagacacttgcaacgtttcgtggtcaatacagcaattctgtgttcatccgtttgtatgtgtcccctgatgacaaagcatccaatgaacatatcttgaagctggaccaagcaacactctccctggccgtgagggaagactaccttgataacagtacagaagccaagtcttatcgggatgccctttacaagttcatggtggatactgccgtgcttttaggagctaacagttccagagcagagcatgacatgaagtcagtgctcagattggaaattaagatagctgagataatgattccacatgaaaaccgaaccagcgaggccatgtacaacaaaatgaacatttctgaactgagtgctatgattccccagttcgactggctgggctacatcaagaaggtcattgacaccagactctacccccatctgaaagacatcagcccctccgagaatgtggtggtccgcgtcccgcagtactttaaagatttgtttaggatattagggtctgagagaaagaagaccattgccaactatttggtgtggagaatggtttattccagaattccaaaccttagcaggcgctttcagtatagatggctggaattctcaagggtaatccaggggaccacaactttgctgcctcaatgggacaaatgtgtaaactttattgaaagtgccctcccttatgttgttggaaagatgtttgtagatgtgtacttccaggaagataagaaggaaatgatggaggaattggttgagggcgttcgctgggcctttattgacatgctagagaaagaaaatgagtggatggatgcaggaacgaaaaggaaagccaaagaaaaggcgagagctgttttggcaaaagttggctatccagagtttataatgaatgatactcatgttaatgaagacctcaaagctatcaagttttcagaagccgactactttggcaacgtcctacaaactcgcaagtatttagcacagtctgatttcttctggctaagaaaagccgttccaaaaacagagtggtttacaaatccgacgactgtcaatgccttctacagtgcatccaccaaccagatccgatttccagcaggagagctccagaagcctttcttttggggaacagaatatcctcgatctctgagttatggtgctataggagtaattgtcggacatgaatttacacatggatttgataataatggtagaaaatatgataaaaatggaaacctggatccttggtggtctactgaatcagaagaaaagtttaaggaaaaaacaaaatgcatgattaaccagtatagcaactattattggaagaaagctggcttaaatgtcaaggggaagaggaccctggga

SEQ ID NO: 5428 - DNA, 594 bp, Homo Sapiens
ggggacacccgaccacgtttcttggagctgcgtaagtctgagtgtcatttcttcaatgggacggagcgggtgcggtacctggacagatacttccataaccaggaggagttcctgcgcttcgacagcgacgtgggggagtaccgggcggtgacggagctggggcggcctgtcgccgagtcctggaacagccagaaggacctcctggagcagaagcggggccgggtggacaattactgcagacacaactacggggttggtgagagcttcacagtgcagcggcgagtccatcctcaggtgactgtgtatcctgcaaagacccagcccctgcagcaccacaacctcctggtctgctctgtgagtggtttctatccaggcagcattgaagtcaggtggttccggaacggccaggaagagaaggctggggtggtgtccacgggcctgatccagaatggagactggaccttccagaccctggtgatgctagaaacagttcctcggagtggagaggtttacacttgccaagtggagcacccaagcgtaacgagcgctctcacagtggaatggagagcacggtctgaatctgcacagagcaag

SEQ ID NO: 5429 - DNA, 2451 bp, Homo Sapiens
tgtggcctttcaacacacgtagaaataggacacagagctctggagtttcttcagcttcacaatgggcgtgttaactacagagagctgttactagaacaccaggatgcgtatcaggctggaatcgtgtttcctgattgtttttaccctagcatctgcaaaggaggaaaattccatgatgtgtctgagagcactcactggactccgtttcttaatgcaagcgttcattatatccgagagaactatccccttccctgggagaaggacacagagaaactggtagctttcttgtttggaattacttctcacatggcggcagatgtcagctggcatagtctgggccttgaacaaggattccttaggaccatgggagctattgattttcacggctcctattcagaggctcattcggctggtgattttggaggagatgtgttgagccagtttgaatttaattttaattaccttgcacgacgctggtatgtgccagtcaaagatctactgggaatttatgagaaactgtatggtcgaaaagtcatcaccgaaaatgtaatcgttgattgttcacatatccagttcttagaaatgtatggtgagatgctagctgtttccaagttatatcccacttactctacaaagtccccgtttttggtggaacaattccaagagtattttcttggaggactggatgatatggcattttggtccactaatatttaccatctaacaagcttcatgttggagaatgggaccagtgactgcaacctgcctgagaaccctctgttcattgcatgtggcggccagcaaaaccacacccagggctcaaaaatgcagaaaaatgattttcacagaaatttgactacatccctaactgaaagtgttgacaggaatataaactatactgaaagaggagtgttctttagtgtaaattcctggaccccggattccatgtcctttatctacaaggctttggaaaggaacataaggacaatgttcataggtggctctcagttgtcacaaaagcacgtctccagccccttagcatcttacttcttgtcatttccttatgcgaggcttggctgggcaatgacctcagctgacctcaaccaggatgggcacggtgacctcgtggtgggcgcaccaggctacagccgccccggccacatccacatcgggcgcgtgtacctcatctacggcaatgacctgggcctgccacctgttgacctggacctggacaaggaggcccacaggatccttgaaggcttccagccctcaggtcggtttggctcggccttggctgtgttggactttaacgtggacggcgtgcctgacctggccgtgggagctccctcggtgggctccgagcagctcacctacaaaggtgccgtgtatgtctactttggttccaaacaaggaggaatgtcttcttcccctaacatcaccatttcttgccaggacatctactgtaacttgggctggactctcttggctgcagatgtgaatggagacagtgaacccgatctggtcatcggctccccttttgcaccaggtggagggaagcagaagggaattgtggctgcgttttattctggccccagcctgagcgacaaagaaaaactgaacgtggaggcagccaactggacggtgagaggcgaggaagacttctcctggtttggatattcccttcacggtgtcactgtggacaacagaaccttgctgttggttgggagcccgacctggaagaatgccagcaggctgggccatttgttacacatccgagatgagaaaaagagccttgggagggtgtatggctacttcccaccaaacggccaaagctggtttaccatttctggagacaaggcaatggggaaactgggtacttccctttccagtggccacgtactgatgaatgggactctgaaacaagtgctgctggttggagcccctacgtacgatgacgtgtctaaggtggcattcctgaccgtgaccctacaccaaggcggagccactcgcatgtacgcactcacatctgacgcgcagcctctgctgctcagcaccttcagcggagaccgccgcttctcccgatttggtggcgttctgcacttgagtgacctggatgatgatggcttagatgaaatcatcatggcagcccccctgaggatagcagatgtaacctctggactgattgggggagaagacggccgagtatatgtatataatggcaaagagaccacccttggtgacatgactggcaaatgcaaatcatggataactccatgtccagaagaaaaggcccaatatgtattgatttctcctgaagccagctcaaggtttgggagctccctcatcaccgtgaggtccaaggcaaagaaccaagtcgtcattgctgctggaaggagttctttgggagcccgactctccggggcacttcacgtctatagccttggctcagat

SEQ ID NO: 5430 - DNA, 534 bp, Homo Sapiens
caggactccacctcagacctgatcccagccccacctctgagcaaggtccctctgcagcagaacttccaggacaaccaattccaggggaagtggtatgtggtaggcctggcagggaatgcaattctcagagaagacaaagacccgcaaaagatgtatgccaccatctatgagctgaaagaagacaagagctacaatgtcacctccgtcctgtttaggaaaaagaagtgtgactactggatcaggacttttgttccaggttgccagcccggcgagttcacgctgggcaacattaagagttaccctggattaacgagttacctcgtccgagtggtgagcaccaactacaaccagcatgctatggtgttcttcaagaaagtttctcaaaacagggagtacttcaagatcaccctctacgggagaaccaaggagctgacttcggaactaaaggagaacttcatccgcttctccaaatctctgggcctccctgaaaaccacatcgtcttccctgtcccaatcgaccagtgtatcgacggc

SEQ ID NO: 5431 - DNA, 1335 bp, Homo Sapiens
gaaaagctacatacccagccctcctgccccgcggtctgccagcccacgcgctgccccgcgctgcccacctgcgcgctggggaccacgccggtgttcgacctgtgccgctgttgccgcgtctgccccgcggccgagcgtgaagtctgcggcggggcgcagggccaaccgtgcgccccggggctgcagtgcctccagccgctgcgccccgggttccccagcacctgcggttgcccgacgctgggaggggccgtgtgcggcagcgacaggcgcacctaccccagcatgtgcgcgctccgggccgaaaaccgcgccgcgcgccgcctgggcaaggtcccggccgtgcctgtgcagtgggggaactgcggggatacagggaccagaagcgcaggcccgctcaggaggaattacaacttcatcgccgcggtggtggagaaggtggcgccatcggtggttcacgtgcagctgtggggcaggttacttcacggcagcaggcttgttcctgtgtacagtggctctgggttcatagtgtctgaggacgggctcattattaccaatgcccatgttgtcaggaaccagcagtggattgaggtggtgctccagaatggggcccgttatgaagctgttgtcaaggatattgaccttaaattggatcttgcggtgattaagattgaatcaaatgctgaacttcctgtactgatgctgggaagatcatctgaccttcgggctggagagtttgtggtggctttgggcagcccattttctctgcagaacacagctactgcaggaattgtcagcaccaaacagcgagggggcaaagaactggggatgaaggattcagatatggactacgtccagattgatgccacaattaactatgggaattctggtggtcctctggtgaacttggatggtgatgtgattggcgtcaattcattgagggtgactgatggaatctcctttgcaattccttcagatcgagttaggcagttcttggcagaataccatgagcaccagatgaaaggaaaggcgttttcaaataagaaatatctgggtctgcaaatgctgtccctcactgtgccccttagtgaagaattgaaaatgcattatccagatttccctgatgtgagttctggggtttatgtatgtaaagtgtttgaaggaacagctgctcaaagctctggattgagagatcacgatgtaattgtcaacataaatgggaaacctattactactacaactgatgttgttaaagctcttgacagtgattccctttccatggctgttcttcggggaaaagataatttgctcctgacagtcatacctgaaacaatcaat

SEQ ID NO: 5432 - DNA, 1308 bp, Homo Sapiens
cgggagccccctgcggcgccgtgtcccgcgcgctgcgacgtgtcgcggtgtcccagcccccgctgccccggcggctacgtgcccgacctctgcaactgctgcctggtgtgcgccgccagcgagggcgagccctgtggcggccctctggactcgccttgcggcgagagcctggagtgcgtgcgcggcctatgccgctgccgctggtcgcacgccgtgtgtggcaccgacgggcacacctatgccaacgtgtgcgcgctgcaggcggccagccgccgcgcgctgcagctctccgggacgcccgtgcgccagctgcagaagggcgcctgcccgttgggtctccaccagctgagcagcccgcgctacaagttcaacttcattgctgacgtggtggagaagatcgcaccagccgtggtccacatagagctcttcctgagacacccgctgtttggccgcaacgtgcccctgtccagcggttctggcttcatcatgtcagaggccggcctgatcatcaccaatgcccacgtggtgtccagcaacagtgctgccccgggcaggcagcagctcaaggtgcagctacagaatggggactcctatgaggccaccatcaaagacatcgacaagaagtcggacattgccaccatcaagatccatcccaagaaaaagctccctgtgttgttgctgggtcactcggccgacctgcggcctggggagtttgtggtggccatcggcagtcccttcgccctacagaacacagtgacaacgggcatcgtcagcactgcccagcgggagggcagggagctgggcctccgggactccgacatggactacatccagacggatgccatcatcaactacgggaactccgggggaccactggtgaacctggatggcgaggtcattggcatcaacacgctcaaggtcacggctggcatctcctttgccatcccctcagaccgcatcacacggttcctcacagagttccaagacaagcagatcaaagactggaagaagcgcttcatcggcatacggatgcggacgatcacaccaagcctggtggatgagctgaaggccagcaacccggacttcccagaggtcagcagtggaatttatgtgcaagaggttgcgccgaattcaccttctcagagaggcggcatccaagatggtgacatcatcgtcaaggtcaacgggcgtcctctagtggactcgagtgagctgcaggaggccgtgctgaccgagtctcctctcctactggaggtgcggcgggggaacgacgacctcctcttcagcatcgcacctgaggtggtcatg

SEQ ID NO: 5433 - DNA, 780 bp, Homo Sapiens
tggggattcaaggatggaatttttcataactccatatggcttgaacgagcagccggtgtgtaccacagagaagcacggtctggcaaatacaagctcacctacgcagaagctaaggcggtgtgtgaatttgaaggcggccatctcgcaacttacaagcagctagaggcagccagaaaaattggatttcatgtctgtgctgctggatggatggctaagggcagagttggataccccattgtgaagccagggcccaactgtggatttggaaaaactggcattattgattatggaatccgtctcaataggagtgaaagatgggatgcctattgctacaacccacacgcaaaggagtgtggtggcgtctttacagatccaaagcaaatttttaaatctccaggcttcccaaatgagtacgaagataaccaaatctgctactggcacattagactcaagtatggtcagcgtattcacctgagttttttagattttgaccttgaagatgacccaggttgcttggctgattatgttgaaatatatgacagttacgatgatgtccatggctttgtgggaagatactgtggagatgagcttccagatgacatcatcagtacaggaaatgtcatgaccttgaagtttctaagtgatgcttcagtgacagctggaggtttccaaatcaaatatgttgcaatggatcctgtatccaaatccagtcaaggaaaaaatacaagtactacttctactggaaataaaaactttttagctggaagatttagccactta

SEQ ID NO: 5434 - DNA, 327 bp, Homo Sapiens
aaaacggacagctcattcataatggactcggaccctcgacgctgcatgaggcaccactatgtggattctatcagtcacccattgtacaagtgtagctcaaagatggtgctcctggccaggtgcgaggggcactgcagccaggcgtcacgctccgagcctttggtgtcgttcagcactgtcctcaagcaacccttccgttcctcctgtcactgctgccggccccagacttccaagctgaaggcactgcggctgcgatgctcagggggcatgcgactcactgccacctaccggtacatcctctcctgtcactgcgaggaatgcaattcc

SEQ ID NO: 5435 - DNA, 1041 bp, Homo Sapiens
accgactgcccatgcccggagcctgagctctgccgcccgattcgccaccatccagatttcgaggtctttgtgtttgatgttggacagaaaacttggaaatcttatgattggtcacagattacaactgtggcaacatttggaaaatatgactcagaacttatgtgctacgctcattcaaaaggagccagagtagtacttaaaggagatgtatccttaaaggatatcattgatcctgctttcagagcatcctggatagctcaaaaacttaatttggccaaaacacaatatatggatggaattaatatagatatagagcaagaagttaattgtttatcacctgaatatgatgcattaactgctttagtcaaagaaactacagactctttccatcgtgaaattgagggatcacaggtaacctttgatgtagcttggtctccaaagaacatagacagaagatgctataattatactggaatcgcagatgcttgtgacttcctctttgtgatgtcttatgatgaacaaagtcagatctggtcagaatgtattgcagcagccaatgctccctataatcagacattaactggatataatgactacatcaagatgagcattaatcctaagaaacttgtaatgggtgttccttggtatggttatgattatacctgcctgaatctgtctgaggatcatgtttgtaccattgcaaaagtccctttccggggggctccttgtagtgacgctgcaggacgtcaggtgccctacaaaacgatcatgaagcaaataaatagttctatttctggaaacctatgggataaagatcagcgggctccttattataactataaagatcctgctggccactttcatcaagtatggtatgataaccctcagagtatttctttaaaggcaacatatatacaaaactatcgcttacggggcattggcatgtggaatgcaaactgtcttgactactctggagatgctgtagccaaacagcaaactgaagaaatgtgggaagtcttaaagccaaagctgttacagaga

SEQ ID NO: 5436 - DNA, 225 bp, Homo Sapiens
gagtcactccaggaaagagctgatgaggctacaacccagaagcagtctggggaagacaaccaggaccttgctatctcctttgcaggaaatggactctctgctcttagaacctcaggttctcaggcaagagccacctgctattgccgaactggccgttgtgctacccgtgagtccctctccggggtgtgtgaaatcagtggccgcctctacagactctgctgtcgc

SEQ ID NO: 5437 - DNA, 1677 bp, Homo Sapiens
caaaaaggtggatcaaaaggccaattgccaagcggatcttcccaatttccacatggaaaaaagggccagcactattttggacaaaaagaccaacaacatactaaatccaaaggcagtttttctattcaacacacatatcatgtagacatcaatgatcatgactggacccgaaaaagtcagcagtatgatttgaatgccctacataaggcgacaaaatcaaaacaacacctaggtggaagtcaacaactgctcaattataaacaagaaggcagagaccatgataaatcaaaaggtcattttcacatgatagttatacatcataaaggaggccaagctcatcatgggacacaaaatccttctcaagatcaggggaatagcccatctggaaagggattatccagtcaatgttcaaacacagaaaaaaggctatgggttcatggactaagtaaagaacaagcttcagcctctggtgcacaaaaaggtagaacacaaggtggatcccaaagcagttatgttctccaaactgaagaactagtagttaacaaacaacaacgtgagactaaaaattctcatcaaaataaagggcattaccaaaatgtggttgacgtgagagaggaacattcaagtaaactacaaacttcactccatcctgcacatcaagacagactccaacatggacccaaagacatttttactacccaagatgagctcctagtatataacaagaatcaacaccagacaaaaaatctcaatcaagatcaagagcatggccggaaggcacataaaatatcatacccgtcttcacgtacagaagaaagacaacttcaccatggagaaaagagtgtacagaaagatgtatccaaaggcagcatttctatccaaactgaagagaaaatacatggcaagtctcaaaaccaggtaacaattcatagtcaagatcaagagcatggccataaggaaaataaaatatcataccaatcttcaagtacagaagaaagacatctcaactgtggagaaaagggcatccagaaaggtgtatccaaaggcagtatttcgatccaaactgaagagcaaatacatggcaagtctcaaaaccaggtaagaattcctagtcaagctcaagagtatggccataaggaaaataaaatatcataccaatcttcgagtacagaagaaagacgtctcaacagtggagaaaaggatgtacagaaaggtgtatccaaaggcagtatttctatccaaactgaagagaaaatacatggcaagtctcaaaaccaggtaacaattcctagtcaagatcaagagcatggccataaggaaaataaaatgtcataccaatcttcaagtacagaagaaagacgactcaactatggaggaaagagcacgcagaaagatgtatcccaaagcagtatttctttccaaattgaaaagctagtagaaggcaagtctcaaatccagacaccaaatcctaatcaagatcaatggtctggccaaaatgcaaaaggaaagtctggtcaatctgcagatagcaaacaagacctactcagtcatgaacaaaaaggcagatacaaacaggaatccagtgagtcacataatattgtaattactgagcatgaggttgcccaagatgatcatttgacacaacaatataatgaagacagaaatccaatatctaca

SEQ ID NO: 5438 - DNA, 1497 bp, Homo Sapiens
gaatggatcaagttcgcagcagcctgtcgtgaaggtgaagacaactcaaagaggaacccaatcgccaaaattcactcagattgtgctgcaaaccagcaagttacataccgcatctctggagtaggaattgatcagccaccatatgggatctttgtcattaatcagaaaactggtgaaattaatataacatccatagttgatcgagaggtcactcctttcttcattatctactgccgagctctgaactcaatgggccaagatttagagaggcctctagagctcagagtcagggttttggatataaatgacaaccctccagtgttttcaatggctacatttgcaggacaaatagaagaaaattctaatgcaaatacactggtgatgatactcaatgctactgacgcagatgaaccgaacaatttgaactcaaaaatagccttcaagattataagacaagaaccttcagattcaccaatgtttattatcaacagaaatactggagaaattcgaacgatgaataattttctagacagagagcaatacggccagtatgctcttgctgtaagaggctctgaccgagatggtggggcagatggcatgtcagcggaatgtgagtgcaacattaaaatcctcgatgtcaatgataatatcccttacatggaacagtcttcatataccatagaaattcaagaaaatactctaaattcaaatttgctcgagattagagtaattgatttggatgaagagttctcagctaactggatggcagtaattttctttatctctggaaatgaaggaaattggtttgagatagaaatgaatgaaagaacaaatgtgggaattttaaaggttgttaagcccttagattatgaagctatgcagagtctgcaactcagtattggtgtcagaaataaagctgaatttcatcattcaattatgtctcaatataaactgaaagcatctgcaatttctgtgactgtgttaaatgtaattgaaggcccagtgtttcgtccaggttcaaagacatatgttgtaactggtaatatgggatcaaatgataaagtgggagactttgtagctactgacctggacacaggtagaccttcaacgactgttaggtatgtaatgggaaataatccagctgacctgctagctgttgattcaagaacaggcaaactcactttgaaaaataaagttaccaaggaacagtacaatatgctcggaggaaaataccaaggaacgattctctctatagatgataatcttcaaagaacttgcactggtacaattaatattaacattcaaagttttggtaatgacgacaggactaatacagagccgaacactaaaattactaccaatactggcagacaagaaagtacttcttccactaactatgataccagcacaacttctactgactctagccaagtatattcttctgaacccggaaacggagccaaagatttgttatcagacaatgtacattttggtcct

SEQ ID NO: 5439 - DNA, 282 bp, Homo Sapiens
gtcaccgtgcaggatggaaatttctccttttctctggagtcagtgaagaagctcaaagacctccaggagccccaggagcccagggttgggaaactcaggaactttgcacccatccctggtgaacctgtggttcccatcctctgtagcaacccgaactttccagaagaactcaagcctctctgcaaggagcccaatgcccaggagatacttcagaggctggaggaaatcgctgaggacccgggcacatgtgaaatctgtgcctacgctgcctgtaccggatgc

SEQ ID NO: 5440 - DNA, 2127 bp, Homo Sapiens
aagggcgacgccaagccggaggacaaccttttagtcctcacggtggccactaaggagaccgagggattccgtcgcttcaagcgctcagctcagttcttcaactacaagatccaggcgcttggcctaggggaggactggaatgtggagaaggggacgtcggcaggtggagggcagaaggtccggctgctgaagaaagctctggagaagcacgcagacaaggaggatctggtcattctcttcacagacagctatgacgtgctgtttgcatcggggccccgggagctcctgaagaagttccggcagtccaggagccaggtggtcttctctgctgaggagctcatctacccagaccgcaggctggagaccaagtatccggtggtgtccgatggcaagaggttcctgggctctggaggcttcatcggttatgcccccaacctcagcaaactggtggccgagtgggagggccaggacagcgacagcgatcagctgttttacaccaagatcttcttggacccggagaagagggagcagatcaatatcaccctggaccaccgctgccgtatcttccagaacctggatggagccttggatgaggtcgtgctcaagtttgaaatgggccatgtgagagcgaggaacctggcctatgacaccctcccggtcctgatccatggcaacgggccaaccaagctgcagttgaactacctgggcaactacatcccgcgcttctggaccttcgaaacaggctgcaccgtgtgtgacgaaggcttgcgcagcctcaagggcattggggatgaagctctgcccacggtcctggtcggcgtgttcatcgaacagcccacgccgtttgtgtccctgttcttccagcggctcctgcggctccactacccccagaaacacatgcgacttttcatccacaaccacgagcagcaccacaaggctcaggtggaagagttcctggcacagcatggcagcgagtaccagtctgtgaagctggtgggccctgaggtgcggatggcgaatgcagatgccaggaacatgggcgcagacctgtgccggcaggaccgcagctgcacctactacttcagcgtggatgctgacgtggccctgaccgagcccaacagcctgcggctgctgatccaacagaacaagaacgtcattgccccgctgatgacccggcatgggaggctgtggtcgaacttctggggggctctcagtgcagatggctactatgcccgttccgaggactacgtggacattgtgcaggggcggcgtgttggtgtctggaatgtgccctatatttcaaacatctacttgatcaagggcagtgccctgcggggtgagctgcagtcctcagatctcttccaccacagcaagctggaccccgacatggccttctgtgccaacatccggcagcaggatgtgttcatgttcctgaccaaccggcacacccttggccatctgctctccctagacagctaccgcaccacccacctgcacaacgacctctgggaggtgttcagcaaccccgaggactggaaggagaagtacatccaccagaactacaccaaagccctggccgggaagctggtggagacgccctgcccggatgtctattggttccccatcttcacggaggtggcctgtgatgagctggtggaggagatggagcactttggccagtggtctctgggcaacaacaaggacaaccgcatccagggtggctacgagaacgtgccgactattgacatccacatgaaccagatcggctttgagcgggagtggcacaaattcctgctggagtacattgcgcccatgacggagaagctctaccccggctactacaccagggcccagtttgacctggcctttgtcgtccgctacaagcctgatgagcagccctcactgatgccacaccatgatgcctccaccttcaccatcaacatcgccctgaaccgagtcggggtggattacgagggcgggggctgtcggttcctgcgctacaactgttccatccgagccccaaggaagggctggaccctcatgcaccctggacgactcacgcattaccatgaggggctccccaccaccaggggcacccgctacatcgcagtctccttcgtcgatccc

SEQ ID NO: 5441 - DNA, 1233 bp, Homo Sapiens
gccgtgttcacggtgggggtcctgggcccctgggcttgcgaccccatcttctctcgggctcgcccggacctggccgcccgcctggccgccgcccgcctgaaccgcgaccccggcctggcaggcggtccccgcttcgaggtagcgctgctgcccgagccttgccggacgccgggctcgctgggggccgtgtcctccgcgctggcccgcgtgtcgggcctcgtgggtccggtgaaccctgcggcctgccggccagccgagctgctcgccgaagaagccgggatcgcgctggtgccctggggctgcccctggacgcaggcggagggcaccacggcccctgccgtgacccccgccgcggatgccctctacgccctgcttcgcgcattcggctgggcgcgcgtggccctggtcaccgccccccaggacctgtgggtggaggcgggacgctcactgtccacggcactcagggcccgggggctgcctgtcgcctccgtgacttccatggagcccttggacctgtctggagcccgggaggccctgaggaaggttcgggacgggcccagggtcacagcagtgatcatggtgatgcactcggtgctgctgggtggcgaggagcagcgctacctcctggaggccgcagaggagctgggcctgaccgatggctccctggtcttcctgcccttcgacacgatccactacgccttgtccccaggcccggaggccttggccgcactcgccaacagctcccagcttcgcagggcccacgatgccgtgctcaccctcacgcgccactgtccctctgaaggcagcgtgctggacagcctgcgcagggctcaagagcgccgcgagctgccctctgacctcaatctgcagcaggtctccccactctttggcaccatctatgacgcggtcttcttgctggcaaggggcgtggcagaagcgcgggctgccgcaggtggcagatgggtgtccggagcagctgtggcccgccacatccgggatgcgcaggtccctggcttctgcggggacctaggaggagacgaggagcccccattcgtgctgctagacacggacgcggcgggagaccggctttttgccacatacatgctggatcctgcccggggctccttcctctccgccggtacccggatgcacttcccgcgtgggggatcagcacccggacctgacccctcgtgctggttcgatccaaacaacatctgcggtggaggactggag

SEQ ID NO: 5442 - DNA, 936 bp, Homo Sapiens
caagtgaaaccttgtgattttccagacattaaacatggaggtctatttcatgagaatatgcgtagaccatactttccagtagctgtaggaaaatattactcctattactgtgatgaacattttgagactccttcaggaagttactgggattacattcattgcacacaaaatgggtggtcaccagcagtaccatgtctcagaaaatgttattttccttatttggaaaatggatataatcaaaattatggaagaaagtttgtacagggtaactctacagaagttgcctgccatcctggctacggtcttccaaaagcgcagaccacagttacatgtacggagaaaggctggtctcctactcccagatgcatccgtgtcagaacatgctcaaaatcagatatagaaattgaaaatggattcatttccgaatcttcctctatttatattttaaataaagaaatacaatataaatgtaaaccaggatatgcaacagcagatggaaattcttcaggatcaattacatgtttgcaaaatggatggtcagcacaaccaatttgcattaattcttcagaaaagtgtgggcctcctccacctattagcaatggtgataccacctcctttctactaaaagtgtatgtgccacagtcaagagtcgagtaccaatgccagccctactatgaacttcagggttctaattatgtaacatgtagtaatggagagtggtcggaaccaccaagatgcatacatccatgtataataactgaagaaaacatgaataaaaataacataaagttaaaaggaagaagtgacagaaaatattatgcaaaaacaggggataccattgaatttatgtgtaaattgggatataatgcaaatacatcaattctatcatttcaagcagtgtgtcgggaagggatagtggaataccccagatgcgaa

SEQ ID NO: 5443 - DNA, 318 bp, Homo Sapiens
gagaaaccctccccctgccagtgctccaggctgagcccccataacaggacgaactgcggcttccctggaatcaccagtgaccagtgttttgacaatggatgctgtttcgactccagtgtcactggggtcccctggtgtttccaccccctcccaaagcaagagtcggatcagtgcgtcatggaggtctcagaccgaagaaactgtggctacccgggcatcagccccgaggaatgcgcctctcggaagtgctgcttctccaacttcatctttgaagtgccctggtgcttcttcccgaagtctgtggaagactgccattac

SEQ ID NO: 5444 - DNA, 936 bp, Homo Sapiens
gaagcaacattttgtgattttccaaaaataaaccatggaattctatatgatgaagaaaaatataagccattttcccaggttcctacaggggaagttttctattactcctgtgaatataattttgtgtctccttcaaaatcattttggactcgcataacatgcacagaagaaggatggtcaccaacaccaaagtgtctcagactgtgtttctttccttttgtggaaaatggtcattctgaatcttcaggacaaacacatctggaaggtgatactgtgcaaattatttgcaacacaggatacagacttcaaaacaatgagaacaacatttcatgtgtagaacggggctggtccacccctcccaaatgcaggtccactgacacttcctgtgtgaatccgcccacagtacaaaatgctcatatactgtcgagacagatgagtaaatatccatctggtgagagagtacgttatgaatgtaggagcccttatgaaatgtttggggatgaagaagtgatgtgtttaaatggaaactggacagaaccacctcaatgcaaagattctacgggaaaatgtgggccccctccacctattgacaatggggacattacttcattcccgttgtcagtatatgctccagcttcatcagttgagtaccaatgccagaacttgtatcaacttgagggtaacaagcgaataacatgtagaaatggacaatggtcagaaccaccaaaatgcttacatccgtgtgtaatatcccgagaaattatggaaaattataacatagcattaaggtggacagccaaacagaagctttatttgagaacaggtgaatcagctgaatttgtgtgtaaacggggatatcgtctttcatcacgttctcacacattgcgaacaacatgttgggatgggaaactggagtatccaacttgtgcaaaaaga

SEQ ID NO: 5445 - DNA, 1986 bp, Homo Sapiens
gtgttttacgctgaacgataccaaatgcccacaggcataaaaggcccactacccaacaccaagacacagttcttcattccctacaccataaagagtaaaggtatagcagtaagaggagagcaaggtactcctggtccaccaggccctgctggacctcgagggcacccaggtccttctggaccaccaggaaaaccaggctacggaagtcctggactccaaggagagccagggttgccaggaccaccgggaccatcagctgtagggaaaccaggtgtgccaggactcccaggaaaaccaggagagagaggaccatatggaccaaaaggagatgttggaccagctggcctaccaggaccccggggcccaccaggaccacctggaatccctggaccggctggaatttctgtgccaggaaaacctggacaacagggacccacaggagccccaggacccaggggctttcctggagaaaagggtgcaccaggagtccctggtatgaatggacagaaaggggaaatgggatatggtgctcctggtcgtccaggtgagaggggtcttccaggccctcagggtcccacaggaccatctggccctcctggagtgggaaaaagaggtgaaaatggggttccaggacagccaggcatcaaaggtgatagaggttttccgggagaaatgggaccaattggcccaccaggtccccaaggccctcctggggaacgagggccagaaggcattggaaagccaggagctgctggagccccaggccagccagggattccaggaacaaaaggtctccctggggctccaggaatagctgggcccccagggcctcctggctttgggaaaccaggcttgccaggcctgaagggagaaagaggacctgctggccttcctgggggtccaggtgccaaaggggaacaagggccagcaggtcttcctgggaagccaggtctgactggaccccctgggaatatgggaccccaaggaccaaaaggcatcccgggtagccatggtctcccaggccctaaaggtgagacagggccagctgggcctgcaggataccctggggctaagggtgaaaggggttcccctgggtcagatggaaaaccagggtacccaggaaaaccaggtctcgatggtcctaagggtaacccagggttaccaggtccaaaaggtgatcctggagttggaggacctcctggtctcccaggccctgtgggcccagcaggagcaaagggaatgcccggacacaatggagaggctggcccaagaggtgcccctggaataccaggtactagaggccctattgggccaccaggcattccaggattccctgggtctaaaggggatccaggaagtcccggtcctcctggcccagctggcatagcaactaagggcctcaatggacccaccgggccaccagggcctccaggtccaagaggccactctggagagcctggtcttccagggccccctgggcctccaggcccaccaggtcaagcagtcatgcctgagggttttataaaggcaggccaaaggcccagtctttctgggacccctcttgttagtgccaaccagggggtaacaggaatgcctgtgtctgcttttactgttattctctccaaagcttacccagcaataggaactcccataccatttgataaaattttgtataacaggcaacagcattatgacccaaggactggaatctttacttgtcagataccaggaatatactatttttcataccacgtgcatgtgaaagggactcatgtttgggtaggcctgtataagaatggcacccctgtaatgtacacctatgatgaatacaccaaaggctacctggatcaggcttcagggagtgccatcatcgatctcacagaaaatgaccaggtgtggctccagcttcccaatgccgagtcaaatggcctatactcctctgagtatgtccactcctctttctcaggattcctagtggctccaatg

SEQ ID NO: 5446 - DNA, 309 bp, Homo Sapiens
atggaagatgagaagcccaaggtcaaccccaaactctacatgtgtgtgtgtgaaggtctctcctgcggtaatgaggaccactgtgaaggccagcagtgcttttcctcactgagcatcaacgatggcttccacgtctaccagaaaggctgcttccaggtttatgagcagggaaagatgacctgtaagaccccgccgtcccctggccaagctgtggagtgctgccaaggggactggtgtaacaggaacatcacggcccagctgcccactaaaggaaaatccttccctggaacacagaatttccacttggag

SEQ ID NO: 5447 - DNA, 417 bp, Homo Sapiens
gacaagaacacgacccagcacccgaacgtgacgactttagcgcccatctccaacgtaacctcggcgccggtgacgtccctcccgctggtcaccactccggcaccagaaacctgtgaaggtcgaaacagctgcgtttcctgttttaatgttagcgttgttaatactacctgcttttggatagaatgtaaagatgagagctattgttcacataactcaacagttagtgattgtcaagtggggaacacgacagacttctgttccgtttccacggccactccagtgccaacagccaattctacagctaaacccacagttcagccctccccttctacaacttccaagacagttactacatcaggtacaacaaataacactgtgactccaacctcacaacctgtgcgaaagtctacctttgat

SEQ ID NO: 5448 - DNA, 624 bp, Homo Sapiens
atcgccgaaaatgaagatgccctcctcagacatttgttccaaggttatcagaaatgggtccgccctgtattacattctaatgacaccataaaagtatattttggattgaaaatatcccagcttgtagatgtggatgaaaagaatcagctgatgacaaccaatgtgtggctcaaacaggaatggacagaccacaagttacgctggaatcctgatgattatggtgggatccattccattaaagttccatcagaatctctgtggcttcctgacatagttctctttgaaaatgctgacggccgcttcgaaggctccctgatgaccaaggtcatcgtgaaatcaaacggaactgttgtctggacccctcccgccagctacaaaagctcctgcaccatggacgtcacgtttttcccgttcgaccgacagaactgctccatgaagtttggatcctggacttatgatggcaccatggttgacctcattttgatcaatgaaaatgtcgacagaaaagacttcttcgataacggagaatgggaaatactgaatgcaaaggggatgaaggggaacagaagggacggcgtgtactcctatccctttatcacgtattccttcgtcctgagacgcctg

SEQ ID NO: 5449 - DNA, 1806 bp, Homo Sapiens
atagatgtttctcagttggtaaatcctgcctttccaggcactgtcacttgcgatgaaagggaaataacagtggagttcccaagcagtcctggcaccaagaaatggcatgcatctgtggtggatcctcttggtctcgacatgccgaactgcacttacatcctggacccagaaaagctcaccctgagggctacctatgataactgtaccaggagagtgcatggtggacaccagatgaccatcagagtcatgaacaacagtgctgccttaagacacggagctgtcatgtatcagttcttctgtccagctatgcaagtagaagagacccaggggctttcagcatctacaatctgccagaaggatttcatgtctttttccttgccacgggtcttctctggcttggctgatgacagtaaggggaccaaagttcagatgggatggagcattgaggttggtgatggtgcaagagccaaaactctgaccctgccagaggccatgaaggaaggcttcagcctcttgattgacaaccacaggatgaccttccatgtgccattcaatgccactggagtgactcactatgtgcaaggtaacagtcatctctacatggtgtctctgaagcttacatttatatctcctggacagaaggtgatcttctcttcacaagctatttgtgcaccagatcctgtgacctgcaatgccacacacatgactctcaccataccagagtttcctgggaagcttaagtctgtgagctttgaaaaccagaacattgatgtgagccagctgcatgacaatggaattgatctagaagcaacaaatggcatgaaattgcatttcagcaaaactctgctcaaaacgaaattatctgaaaaatgcctactccatcagttctacttagcttcactcaagctgacctttctccttcggccagagacagtatccatggtgatctatcctgagtgtctctgtgagtcacccgtttctatagttacaggggagctgtgcacccaggatgggtttatggacgtcgaggtctacagctaccaaacacaaccagctcttgacctgggtactctgagggtgggaaactcatcctgccagcctgtctttgaggctcagtctcaggggctggtacggttccacatacccctgaatggatgtggaacgagatataagttcgaagatgataaagtcgtctatgaaaacgaaatacatgctctctggacggattttcctccaagcaaaatatctagagacagtgagttcagaatgacagtgaagtgttcttatagcaggaatgacatgctactaaacatcaacgttgaaagccttactcctccagtggcctcagtgaagttgggtccatttaccttgatcctgcaaagctacccagataattcctaccaacaaccttatggggaaaacgagtaccctctagtgagattcctccgccaaccaatttacatggaagtgagagtcctaaacagggatgaccccaacatcaagctggtcttagatgactgctgggcgacgtccaccatggatccagactctttcccccagtggaacgttgtcgtggatggctgtgcatatgacctggacaactaccagaccaccttccatccagtcggctcctctgtgacccatcctgatcactatcagaggtttgacatgaaggcttttgcctttgtatcagaagcccacgtgctctctagcctggtctacttccactgcagtgccttaatctgtaatcgactctcccctgactccccactgtgttctgtgacctgccctgtgtcctctaggcac

SEQ ID NO: 5450 - DNA, 1851 bp, Homo Sapiens
ctcccggaaggggtggccaatggcatcgaggtctacagtaccaaaatcaactccaaggtgacctcccgttttgctcacaatgttgtcaccatgagagccgtcaaccgtgcagacacggccaaggaggtttcctttgatgtggagctgcccaagacggccttcatcaccaacttcaccttgaccatcgacggtgttacctaccctgggaatgtcaaggagaaggaagttgccaagaagcagtatgaaaaggctgtgtcccagggcaagacggccggcttggtcaaggcctctgggaggaagttggagaagttcacagtctcggtcaacgtggctgcaggcagcaaagtcaccttcgagctaacctacgaggagctgctgaagaggcacaagggcaagtacgagatgtacctcaaggtccagcctaagcaactggtcaaacactttgagatcgaggtagacatcttcgagcctcagggaatcagcatgctggatgctgaggcctctttcatcaccaacgacctcctgggaagcgccctcaccaagtccttctcagggaaaaagggccatgtgtccttcaagcccagcttagaccaacagcgttcatgcccaacctgtacagactccctcctcaatggagatttcactatcacctatgacgtgaacagagaatctcctggcaacgtgcagatagtcaatggctacttcgtgcacttctttgcacctcaaggccttccagtggtgcctaagaacgtggcctttgtgattgacatcagcggctccatggctggtcggaaattagagcagacaaaggaggcccttctcagaatcctggaagatatgcaagaggaagactatctgaatttcatcctgttcagtggagatgtgtccacatggaaagagcacttagtccaggccacgcccgagaacctccaggaggccaggacgtttgtgaagagcatggaggataaaggaatgaccaacatcaatgacgggctgctgaggggcatcagtatgctgaacaaggcccgagaggagcacagaatcccagagaggagcacctccattgtcatcatgctgactgatggggatgccaatgttggtgagagcagacccgaaaaaatccaagagaatgtgcggaatgccatcgggggcaagttccccttgtataacctgggctttggcaacaatctgaattataacttcctggagaacatggccctggagaaccatgggtttgcccggcgcatttatgaggactctgatgccgatttgcagttgcagggcttctatgaggaggtggccaacccactgctgacgggtgtggagatggagtaccccgagaacgctatcctggacctcacccagaacacttaccagcacttctacgatggctctgagatcgtggtggccgggcgcctggtggacgaggacatgaacagctttaaggcagatgtgaagggccatggggccaccaacgacctgaccttcacagaggaggtggacatgaaggagatggagaaggccctgcaggagcgggactacatcttcgggaattacattgagcggctctgggcctacctcaccattgagcagctgctggagaagcgcaagaacgcccatggcgaggagaaggagaacctcacggcccgggccctggacctgtccctcaagtatcactttgtgactccactgacctcaatggtggtgaccaagcctgaggacaacgaggatgagagggccattgccgacaagcctggggaagatgcagaagccacaccggtgagccccgccatgtcctacctgaccagctaccagcctcctcaaaacccctactactatgtggacggggat

SEQ ID NO: 5451 - DNA, 1947 bp, Homo Sapiens
ggctacatcgaggctcttgcagccaatgccggaacaggatttgctgttgctgagcctcaaatcgcaatgttttgtgggaagttaaatatgcatgtgaacattcagactgggaaatgggaacctgatccaacaggcaccaagagctgctttgaaacaaaagaagaagttcttcagtactgtcaggagatgtatccagagctacagatcacaaatgtgatggaggcaaaccagcgggttagtattgacaactggtgccggagggacaaaaagcaatgcaagagtcgctttgttacacctttcaagtgtctcgtgggtgaatttgtaagtgatgtcctgctagttccagaaaagtgccagtttttccacaaagagcggatggaggtgtgtgagaatcaccagcactggcacacggtagtcaaagaggcatgtctgactcagggaatgaccttatatagctacggcatgctgctcccatgtggggtagaccagttccatggcactgaatatgtgtgctgccctcagacaaagattattggatctgtgtcaaaagaagaggaagaggaagatgaagaggaagaggaagaggaagatgaagaggaagactatgatgtttataaaagtgaatttcctactgaagcagatctggaagacttcacagaagcagctgtggatgaggatgatgaggatgaggaagaaggggaggaagtggtggaggaccgagattactactatgacaccttcaaaggagatgactacaatgaggagaatcctactgaacccggcagcgacggcaccatgtcagacaaggaaattactcatgatgtcaaagctgtctgctcccaggaggcgatgacggggccctgccgggccgtgatgcctcgttggtacttcgacctctccaagggaaagtgcgtgcgctttatatatggtggctgcggcggcaacaggaacaattttgagtctgaggattattgtatggctgtgtgtaaagcgatgattcctccaactcctctgccaaccaatgatgttgatgtgtatttcgagacctctgcagatgataatgagcatgctcgcttccagaaggctaaggagcagctggagattcggcaccgcaaccgaatggacagggtaaagaaggaatgggaagaggcagagcttcaagctaagaacctccccaaagcagagaggcagactctgattcagcacttccaagccatggttaaagctttagagaaggaagcagccagtgagaagcagcagctggtggagacccacctggcccgagtggaagctatgctgaatgaccgccgtcggatggctctggagaactacctggctgccttgcagtctgacccgccacggcctcatcgcattctccaggccttacggcgttatgtccgtgctgagaacaaagatcgcttacataccatccgtcattaccagcatgtgttggctgttgacccagaaaaggcggcccagatgaaatcccaggtgatgacacatctccacgtgattgaagaaaggaggaaccaaagcctctctctgctctacaaagtaccttatgtagcccaagaaattcaagaggaaattgatgagctccttcaggagcagcgtgcagatatggaccagttcactgcctcaatctcagagacccctgtggacgtccgggtgagctctgaggagagtgaggagatcccaccgttccaccccttccaccccttcccagccctacctgagaacgaaggatctggagtgggagagcaggatgggggactgatcggtgccgaagagaaagtgattaacagtaagaataaagtggatgaaaacatggtcattgacgagactctggatgttaaggaaatgattttcaatgccgagagagttggaggcctcgaggaagagcgggaatccgtgggcccactgcgggaggacttcagtctgagtagc

SEQ ID NO: 5452 - DNA, 486 bp, Homo Sapiens
cccatcatcatgggctccaacatcggcacctctgtcaccaacaccatcgtggccctgatgcaggcgggggacaggactgacttccggcgggccttcgcgggggccacggtgcatgactgctttaactggctgtcagtgctggtcctgctgcccctggaggctgccactggctacctgcaccacatcactcgacttgtggtggcctccttcaacatccatggtggccgtgatgctcctgacctgctcaagatcatcacagagcccttcacgaagctcatcatccagctggacgagtctgtgataaccagcattgccactggtgatgagtccctgaggaaccacagtctcatccagatctggtgccacccagactccttacaggctcccacctccatgtccagagcagaggccaactccagccagacccttggaaatgccaccatggagaaatgcaaccacatctttgtggacactggcctaccggac

SEQ ID NO: 5453 - DNA, 672 bp, Homo Sapiens
ctgaacgaggaggagcggctgatccggcacctgtttcaagagaagggctacaacaaggagctccggcccgtggcacacaaagaggagagtgtggacgttgccctggccctcacactctccaacctcatctccctgaaagaagttgaggagaccctcactaccaatgtgtggatagagcacggctggacagacaaccggctgaagtggaatgctgaagaatttggaaacatcagtgtcctgcgcctccccccggacatggtgtggctcccagagattgtgctggagaacaacaatgacggctccttccagatctcctactcctgcaacgtgcttgtctaccactacggcttcgtgtactggctgccacctgccatcttccgctcctcctgccccatctctgtcacctatttccccttcgactggcagaactgctccctcaagttcagttccctcaagtatacggccaaagagatcaccctgagcctgaaacaggatgccaaggagaaccgcacctaccccgtggagtggatcatcattgatcctgaaggcttcacagagaacggggagtgggagatagtccaccggccggccagggtcaacgtggaccccagagcccctctggacagccccagccgccaggacatcaccttctacctcatcatccgccgcaag

SEQ ID NO: 5454 - DNA, 627 bp, Homo Sapiens
ctgcacaccgacggagacaaagcttttgttgatttcctgagtgatgaaattaaggaggaaagaaaaattcagaagcataaaaccctccctaagatgtctggaggttgggagctggaactgaatgggacagaagcgaaattagtgcggaaagttgccggggaaaaaatcacggtcactttcaacattaacaacagcatcccaccaacatttgatggtgaggaggaaccctcgcaagggcagaaggttgaagaacaggagcctgaactgacatcaactcccaatttcgtggttgaagttataaagaatgatgatggcaagaaggcccttgtgttggactgtcattatccagaggatgaggttggacaagaagacgaggctgagagtgacatcttctctatcagggaagttagctttcagtccactggcgagtctgaatggaaggatactaattatacactcaacacagattccttggactgggccttatatgaccacctaatggatttccttgccgaccgaggggtggacaacacttttgcagatgagctggtggagctcagcacagccctggagcaccaggagtacattacttttcttgaagacctcaagagttttgtcaagagccag

SEQ ID NO: 5455 - DNA, 2754 bp, Homo Sapiens
accagatcgtgtgactccagcggggacggcgggccgggcactgcgccagctccttcccacctgccttcttccacggccagcccctcaggtcctcctgcccaggaccaggacatctgcccggccagtgaggatgagagcggacagtggaaaaactttcgactgccggacttcgtcaacccagtccactacgacctgcacgtgaagcccctgttggaggaggacacctacacgggcaccgtgagcatctccatcaacctgagcgctcccacccggtacctgtggctgcacctccgggagaccaggatcacccggctcccggagctgaagaggccctctggggaccaggtgcaagtccggaggtgtttcgagtacaaaaagcaggagtacgtggtggtcgaggcggaggaagagcttacccccagcagtggagatggcctgtatctcctgaccatggagttcgccggctggctgaacggctccctcgtgggattttatagaaccacctacacggagaacggacgagtcaagagcatagtggccaccgatcatgaaccaacagatgccaggaaatcttttccttgttttgatgagcccaacaaaaaggcaacttatacaatatctatcacccatcccaaagaatacggagcactttcaaatatgccagtggcgaaagaagagtcagtggatgataaatggactcgaacaacttttgagaagtctgtccccatgagcacgtacctggtgtgctttgctgtacatcaatttgactctgtaaagagaatatcaaatagtggaaaacctcttacaatttatgtccagccagagcaaaagcacacagccgaatatgctgcaaacataactaaaagtgtgtttgattattttgaagaatactttgctatgaattattctcttcctaaattagataaaatcgctattccagattttggcactggtgccatggagaactggggactcatcacgtacagagaaacgaacctgctttatgaccctaaggaatcagcctcatcaaaccaacagagggtggccactgtggttgcccatgaacttgtgcatcagtggtttggaaatattgtgaccatggactggtgggaagacttgtggctaaatgaaggatttgcttctttctttgagtttctgggagtaaaccatgcagaaacagactggcaaatgcgtgaccaaatgttacttgaagatgtattacctgttcaagaggatgattctttgatgtcttcgcatccaattattgtgactgtgacaacccctgatgaaataacatctgtttttgatggaatatcctatagcaagggatcttctattttgagaatgcttgaagactggataaaaccagagaattttcaaaaaggatgtcagatgtacttggaaaaataccaattcaagaatgcaaaaacttctgatttttgggcagcactggaagaggcaagtaggctaccagtgaaagaagtaatggacacctggaccagacagatgggttatcctgtgcttaacgtgaacggtgtcaagaacatcacacagaaacgctttttgttggacccaagagctaacccttctcagcccccttcagatcttggttatacatggaatatcccagttaaatggactgaagataatataacaagcagtgtgttatttaataggtcagaaaaagaaggaatcactttgaactcctctaatcctagtggaaatgcttttctcaaaataaacccagatcatattgggttttatcgtgtaaattatgaagtagcaacttgggactcgatagctacagcgctctccttgaaccacaagacattttcttcagcagatcgtgcaagtcttattgatgatgcttttgccttggcaagagctcaacttctagattataaggtggctttgaacttgaccaagtatctcaaaagggaagagaattttttaccatggcagagagtaatttcagctgtaacctacatcattagcatgtttgaagatgataaagagctatatcctatgattgaggaatacttccaaggtcaagtgaagcctattgcagattctctgggatggaatgatgctggagaccatgtcacaaagttactccgttcctccgtgttagggtttgcgtgcaagatgggagacagagaagccttgaacaatgcttcctcgttatttgagcagtggctaaatgggactgtaagccttcccgtaaatctcaggcttctggtgtatcggtatgggatgcagaactctggcaatgagatttcatggaactacactcttgagcaataccagaaaacttcattagctcaagaaaaagaaaaactgctgtatggattagcatcagtgaagaacgttactcttttgtcaaggtatttggatttgctcaaggacacgaaccttattaaaactcaggatgtgtttacagtcattcgatatatctcatataacagctatgggaagaacatggcctggaattggatacaactcaactgggactatctagtcaacagatatacactcaataacagaaaccttggccgaattgtcacaatagcagagccattcaacactgaactgcaactgtggcagatggagagcttttttgcaaaatatccacaagctggagcaggagaaaaacctagggaacaagtgctggaaacagtgaaaaacaatatagagtggctaaaacaacatagaaacaccatcagagaatggttttttaatttacttgagagtggt

SEQ ID NO: 5456 - DNA, 549 bp, Homo Sapiens
cagtatggcgattatggatacccataccagcagtatcatgactacagcgatgatgggtgggtgaatttgaaccggcaaggcttcagctaccagtgtccccaggggcaggtgatagtggccgtgaggagcatcttcagcaagaaggaaggttctgacagacaatggaactacgcctgcatgcccacaccacagagcctcggggaacccacggagtgctggtgggaggagatcaacagggctggcatggaatggtaccagacgtgctccaacaatgggctggtggcaggattccagagccgctacttcgagtcagtgctggatcgggagtggcagttttactgttgtcgctacagcaagaggtgcccatattcctgctggctaacaatagaatatccaggtcactatggtgaggaaatggacatgatttcctacaattatgattactatatccgaggagcaacaaccactttctctgcagtggaaagggatcgccagtggaagttcataatgtgccggatgactgaatacgactgtgaatttgcaaatgtt

SEQ ID NO: 5457 - DNA, 1731 bp, Homo Sapiens
gccctctctccaaagtgcctagactggtggcaggaggggcccatgtaccagatctacccaaggtctttcaaggacagtaacaaggatgggaacggagatctgaaaggtattcaagataaactggactacatcacagctttaaatataaaaactgtttggattacttcattttataaatcgtcccttaaagatttcagatatggtgttgaagatttccgggaagttgatcccatttttggaacgatggaagattttgagaatctggttgcagccatacatgataaaggtttaaaattaatcatcgatttcataccaaaccacacgagtgataaacatatttggtttcaattgagtcggacacggacaggaaaatatactgattattatatctggcatgactgtacccatgaaaatggcaaaaccattccacccaacaactggttaagtgtgtatggaaactccagttggcactttgacgaagtgcgaaaccaatgttattttcatcagtttatgaaagagcaacctgatttaaatttccgcaatcctgatgttcaagaagaaataaaagaaattttacggttctggctcacaaagggtgttgatggttttagtttggatgctgttaaattcctcctagaagcaaagcacctgagagatgagatccaagtaaataagacccaaatcccggacacggtcacacaatactcggagctgtaccatgacttcaccaccacgcaggtgggaatgcacgacattgtccgcagcttccggcagaccatggaccaatacagcacggagcccggcagatacaggttcatggggactgaagcctatgcagagagtattgacaggaccgtgatgtactatggattgccatttatccaagaagctgattttcccttcaacaattacctcagcatgctagacactgtttctgggaacagcgtgtatgaggttatcacatcctggatggaaaacatgccagaaggaaaatggcctaactggatgattggtggaccagacagttcacggctgacttcgcgtttggggaatcagtatgtcaacgtgatgaacatgcttcttttcacactccctggaactcctataacttactatggagaagaaattggaatgggaaatattgtagccgcaaatctcaatgaaagctatgatattaatacccttcgctcaaagtcaccaatgcagtgggacaatagttcaaatgctggtttttctgaagctagtaacacctggttacctaccaattcagattaccacactgtgaatgttgatgtccaaaagactcagcccagatcggctttgaagttatatcaagatttaagtctacttcatgccaatgagctactcctcaacaggggctggttttgccatttgaggaatgacagccactatgttgtgtacacaagagagctggatggcatcgacagaatctttatcgtggttctgaattttggagaatcaacactgttaaatctacataatatgatttcgggccttcccgctaaaataagaataaggttaagtaccaattctgccgacaaaggcagtaaagttgatacaagtggcatttttctggacaagggagagggactcatctttgaacacaacacgaagaatctccttcatcgccaaacagctttcagagatagatgctttgtttccaatcgagcatgctattccagtgtactgaacatactgtatacctcgtgt

SEQ ID NO: 5458 - DNA, 1191 bp, Homo Sapiens
gacatgaagggacattttgatcctgccaagtgccgctatgccctgggcatgcaggaccggaccatcccagacagtgacatctctgcttccagctcctggtcagattccactgccgcccgccacagcaggttggagagcagtgacggggatggggcctggtgccccgcagggtcggtgtttcccaaggaggaggagtacttgcaggtggatctacaacgactgcacctggtggctctggtgggcacccagggacggcatgccgggggcctgggcaaggagttctcccggagctaccggctgcgttactcccgggatggtcgccgctggatgggctggaaggaccgctggggtcaggaggtgatctcaggcaatgaggaccctgagggagtggtgctgaaggaccttgggccccccatggttgcccgactggttcacttctacccccgggctgaccgggtcatgagcgtctgtctgcgggtagagctctatggctgcctctggagggatggactcctgtcttacaccgcccctgtggggcagacaatgtatttatctgaggccgtgtacctcaacgactccacctatgacggacataccgtgggcggactgcagtatgggggtctgggccagctggcagatggtgtggtggggctggatgactttaggaagagtcaggagctgcgggtctggccaggctatgactatgtgggatggagcaaccacagcttctccagtggctatgtggagatggagtttgagtttgaccggctgagggccttccaggctatgcaggtccactgtaacaacatgcacacgctgggagcccgtctgcctggcggggtggaatgtcgcttccggcgtggccctgccatggcctgggagggggagcccatgcgccacaacctagggggcaacctgggggaccccagagcccgggctgtctcagtgccccttggcggccgtgtggctcgctttctgcagtgccgcttcctctttgcggggccctggttactcttcagcgaaatctccttcatctctgatgtggtgaacaattcctctccggcactgggaggcaccttcccgccagccccctggtggccgcctggcccacctcccaccaacttcagcagcttggagctggagcccagaggccagcagcccgtggccaaggccgaggggagcccgaccgcc

SEQ ID NO: 5459 - DNA, 1701 bp, Homo Sapiens
gtgaacgatggtgacatgcggctggccgatgggggcgccaccaaccagggccgcgtggagatcttctacagaggccagtggggcactgtgtgtgacaacctgtgggacctgactgatgccagcgtcgtctgccgggccctgggcttcgagaacgccacccaggctctgggcagagctgccttcgggcaaggatcaggccccatcatgctggatgaggtccagtgcacgggaaccgaggcctcactggccgactgcaagtccctgggctggctgaagagcaactgcaggcacgagagagacgctggtgtggtctgcaccaatgaaaccaggagcacccacaccctggacctctccagggagctctcggaggcccttggccagatctttgacagccagcggggctgcgacctgtccatcagcgtgaatgtgcagggcgaggacgccctgggcttctgtggccacacggtcatcctgactgccaacctggaggcccaggccctgtggaaggagccgggcagcaatgtcaccatgagtgtggatgctgagtgtgtgcccatggtcagggaccttctcaggtacttctactcccgaaggattgacatcaccctgtcgtcagtcaagtgcttccacaagctggcctctgcctatggggccaggcagctgcagggctactgcgcaagcctctttgccatcctcctcccccaggacccctcgttccagatgcccctggacctgtatgcctatgcagtggccacaggggacgccctgctggagaagctctgcctacagttcctggcctggaacttcgaggccttgacgcaggccgaggcctggcccagtgtccccacagacctgctccaactgctgctgcccaggagcgacctggcggtgcccagcgagctggccctactgaaggccgtggacacctggagctggggggagcgtgcctcccatgaggaggtggagggcttggtggagaagatccgcttccccatgatgctccctgaggagctctttgagctgcagttcaacctgtccctgtactggagccacgaggccctgttccagaagaagactctgcaggccctggaattccacactgtgcccttccagttgctggcccggtacaaaggcctgaacctcaccgaggatacctacaagccccggatttacacctcgcccacctggagtgcctttgtgacagacagttcctggagtgcacggaagtcacaactggtctatcagtccagacgggggcctttggtcaaatattcttctgattacttccaagccccctctgactacagatactacccctaccagtccttccagactccacaacaccccagcttcctcttccaggacaagagggtgtcctggtccctggtctacctccccaccatccagagctgctggaactacggcttctcctgctcctcggacgagctccctgtcctgggcctcaccaagtctggcggctcagatcgcaccattgcctacgaaaacaaagccctgatgctctgcgaagggctcttcgtggcagacgtcaccgatttcgagggctggaaggctgcgattcccagtgccctggacaccaacagctcgaagagcacctcctccttcccctgcccggcagggcacttcaacggcttccgcacggtcatccgccccttctacctgaccaactcctcaggtgtggac

SEQ ID NO: 5460 - DNA, 1671 bp, Homo Sapiens
cgatgggctcctattccagcttcattgatggagaactcgttgggtccatttccacaacacgttcagcagatccaatctgatgctgcacagaattacaccatcttttattccataagtgggccaggcgtggacaaagaacccttcaatttgttttacatagagaaagacactggggatatcttttgtacaaggagcattgaccgtgagaaatacgaacagtttgcgttatatggctatgcaacaactgcagatggctatgcaccagaatatccactccctttgatcatcaaaattgaagatgataatgataacgccccatattttgaacacagagtgactatctttactgtgcctgaaaattgccgatccggaacttcagtgggaaaagtgaccgccacagaccttgacgaacctgacactctccatactcgtctgaaatataaaatcttacaacaaatcccagatcatccaaagcatttctccatacacccagataccggtgtcatcaccacaactacaccttttctggatagagaaaaatgtgatacttaccagttaataatggaagtgcgagacatgggtggtcagcctttcggtttatttaatacaggaacaattactatttcacttgaggatgaaaatgacaatccaccatctttcacagaaacttcttatgttacagaagtagaagaaaacagaattgacgtggagattttgcgaatgaaggtacaggatcaggatttgccaaacactcctcactcaaaggctgtatacaaaatcttacaaggaaatgaaaatggaaacttcataattagcacagatccaaatacaaatgaaggagtgctgtgtgttgtcaagccattgaactatgaagtcaatcgccaagttattttgcaagttggtgtcattaacgaggcacaattctctaaagcagcgagctcacaaactcctacaatgtgcactacaactgtcaccgttaaaattatagacagtgatgagggccctgaatgccaccctccagtgaaagttattcagagtcaagatggcttcccagctggccaagaactccttggatacaaagcactggacccggaaatatccagtggtgaaggcttaaggtatcagaagttaggggatgaagataactggtttgaaattaatcaacacactggcgacttgagaactctaaaagtactagatagagaatccaaatttgtaaaaaacaaccaatacaatatttcagttgttgcagtggatgcagttggccgatcttgcactggaacattagtagttcatttggatgattacaacgatcacgcacctcaaattgacaaagaagtgaccatttgtcagaataatgaggattttgctgttctgaaacctgtagatccagatggacctgaaaatggaccaccttttcaattctttctggataattctgccagtaaaaactggaacatagaagaaaaggatggtaaaactgccattcttcgtcaacggcaaaatcttgattataactattattctgtgcctattcaaataaaagacaggcatggtttagttgcaacacatatgttaacagtgagagtatgtgactgttcaactccatctgagtgtagaatgaaggataaaagtacaagagacgttagaccaaatgtaatacttggaaga

SEQ ID NO: 5461 - DNA, 1254 bp, Homo Sapiens
cggcacctggacgcgctcgccggaggcgcgggccccaaccacggcaatttcctagacaatgaccagtggctgagcaccgtctcccagtacgaccgggacaagtactggaaccgctttcgagacgatgattatttcagaaactggaatcccaacaagccctttgacaaagccctggacccatccaaggacccctgcctgaaggtaaaatgcagccctcacaaagtgtgtgtgacccaggactaccagaccgccctgtgtgtcagccgcaagcacctgctccccaggcaaaagaaggggaacgtggcccagaaacactgggttggaccttcgaatttggtcaagtgcaagccctgtcccgtggcacagtcagccatggtctgcggctcagatggccactcctacacatccaagtgcaaattggagttccatgcttgttctactggcaaaagcctcgccaccctctgtgatgggccctgtccctgtctcccagagcctgagccaccaaagcacaaggcagaaaggagtgcctgcacagacaaggagttgcggaaccttgcctcccggctgaaggattggtttggagctctccacgaggatgcgaacagagtcatcaagcccaccagctccaacacagcccaaggcaggtttgacactagcatcctgcccatctgcaaggactccctgggctggatgttcaacaagttggacatgaactatgacctcctgcttgacccttcagagatcaatgccatctacctggataagtacgagccctgtatcaagcctcttttcaactcgtgtgactccttcaaggatggcaagctttctaacaatgagtggtgctactgcttccagaagcctggaggtctcccttgccagaatgaaatgaacagaattcagaagctgagtaaggggaaaagcctgttgggggccttcatacctcggtgtaatgaggagggctattacaaagccacacagtgccacggcagcacggggcagtgctggtgtgtggacaaatatgggaatgagttggctggctccaggaaacagggtgctgtgagctgtgaagaggagcaggaaacctcaggggattttggcagtggtgggtccgtggtcctgctggatgacctagaatatgaacgggagctgggaccaaaggacaaagaggggaagctgagggtgcacacccgagccgtgacagaggatgatgaggatgaggatgatgacaaagaggatgaggtcgggtacatatgg

SEQ ID NO: 5462 - DNA, 870 bp, Homo Sapiens
ctcgaggactgtgcccaggagcagatgcggctcagagcccaggtgcgcctgcttgagacccgggtcaaacagcaacaggtcaagatcaagcagcttttgcaggagaatgaagtccagttccttgataaaggagatgagaatactgtcattgatcttggaagcaagaggcagtatgcagattgttcagagattttcaatgatgggtataagctcagtggattttacaaaatcaaacctctccagagcccagcagaattttctgtttattgtgacatgtccgatggaggaggatggactgtaattcagagacgatctgatggcagtgaaaactttaacagaggatggaaagactatgaaaatggctttggaaattttgtccaaaaacatggtgaatattggctgggcaataaaaatcttcacttcttgaccactcaagaagactacactttaaaaatcgaccttgcagattttgaaaaaaatagccgttatgcacaatataagaatttcaaagttggagatgaaaagaatttctacgagttgaatattggggaatattctggaacagctggagattcccttgcggggaattttcatcctgaggtgcagtggtgggctagtcaccaaagaatgaaattcagcacgtgggacagagatcatgacaactatgaagggaactgcgcagaagaagatcagtctggctggtggtttaacaggtgtcactctgcaaacctgaatggtgtatactacagcggcccctacacggctaaaacagacaatgggattgtctggtacacctggcatgggtggtggtattctctgaaatctgtggttatgaaaattaggccaaatgattttattccaaatgtaatt

SEQ ID NO: 5463 - DNA, 216 bp, Homo Sapiens
gagacctccccgattttgacagagaagcaggccaaacagctcctaagatctcggcgacaggatagaccaagcaaacccggattccccgatgagccaatgcgggaatacatgcaccacctgctcgccctggagcatcgcgctgaggagcagttcctggagcactggctgaaccctcactgcaaaccccactgtgacaggaacaggattcatcctgtg

SEQ ID NO: 5464 - DNA, 339 bp, Homo Sapiens
gcctgccccgcctccgccgacctcaagcactcggacgggacgcgcacttgcgccaagctctatgacaagagcgacccctactatgagaactgctgcgggggcgccgagctgtcgctggagtcgggcgcagacctgccctacctgccctccaactgggccaacaccgcctcctcacttgtggtggccccgcgctgcgagctcaccgtgtggtcccggcaaggcaaggcgggcaagacgcacaagttctctgccggcacctacccgcgcctggaggagtaccgccggggcatcttaggagactggtccaacgctatctccgcgctctactgcaggtgcagc

SEQ ID NO: 5465 - DNA, 795 bp, Homo Sapiens
ggggcgcgcgcgcggtggcgcggggagggcaccagcgcacacttgcgggacatcttcctgggccgctgcgccgagtaccgcgcactgctgagtcccgagcagcggaacaagaactgcacagccatctgggaagcctttaaagtggcgctggacaaggatccctgctccgtgctcccctcagactatgacctttttattaacttgtccaggcactctattcccagagataagtccctgttctgggaaaatagccacctccttgttaacagctttgcagacaacacccgtcgttttatgcccctgagcgatgttctgtatggcagggttgcagatttcttgagctggtgtcgacagaaaaatgactctggactcgattaccaatcctgccctacatcagaagactgtgaaaataatcctgtggattccttttggaaaagggcatccatccagtattccaaggatagttctggggtgatccacgtcatgctgaatggttcagagccaacaggagcctatcccatcaaaggtttttttgcagattatgaaattccaaacctccagaaggaaaaaattacacgaatcgagatctgggttatgcatgaaattgggggacccaatgtggaatcctgcggggaaggcagcatgaaagtcctggaaaagaggctgaaggacatggggttccagtacagctgtattaatgattaccgaccagtgaagctcttacagtgcgtggaccacagcacccatcctgactgtgccttaaagtcggcagcagccgctactcaaagaaaagcc

SEQ ID NO: 5466 - DNA, 339 bp, Homo Sapiens
aacagcgaggcctgccgggacggccttcgggcagtgatggagtgtcgcaatgtcacccatctcctgcaacaagagctgaccgaggcccagaagggctttcaggatgtggaggcccaggccgccacctgcaaccacactgtgatggccctaatggcttccctggatgcagagaaggcccaaggacaaaagaaagtggaggagcttgagggagagatcactacattaaaccataagcttcaggacgcgtctgcagaggtggagcgactgagaagagaaaaccaggtcttaagcgtgagaatcgcggacaagaagtactaccccagctcccaggactccagc

SEQ ID NO: 5467 - DNA, 864 bp, Homo Sapiens
gaggaagagctaaggagcaaatccaagatctgtgccaatgtgttttgtggagccggccgggaatgtgcagtcacagagaaaggggaacccacctgtctctgcattgagcaatgcaaacctcacaagaggcctgtgtgtggcagtaatggcaagacctacctcaaccactgtgaactgcatcgagatgcctgcctcactggatccaaaatccaggttgattacgatggacactgcaaagagaagaaatccgtaagtccatctgccagcccagttgtttgctatcagtccaaccgtgatgagctccgacgtcgcatcatccagtggctggaagctgagatcattccagatggctggttctctaaaggcagcaactacagtgaaatcctagacaagtattttaagaactttgataatggtgattctcgcctggactccagtgaattcctgaagtttgtggaacagaatgaaactgccatcaatattacaacgtatccagaccaggagaacaacaagttgcttaggggactctgtgttgatgctctcattgaactgtctgatgaaaatgctgattggaaactcagcttccaagagtttctcaagtgcctcaacccatctttcaaccctcctgagaagaagtgtgccctggaggatgaaacgtatgcagatggagctgagaccgaggtggactgtaaccgctgtgtctgtgcctgtggaaattgggtctgtacagccatgacctgtgacggaaagaatcagaagggggcccagacccagacagaggaggagatgaccagatatgtccaggagctccaaaagcatcaggaaacagctgaaaagaccaagagagtgagcaccaaagagatc

SEQ ID NO: 5468 - DNA, 2205 bp, Homo Sapiens
ttacgcccttcaagagttcataactctgaagaaaatacaatgagagcactcacactgaaggatattttaaatggaacattttcttataaaacattttttccaaactggatttcaggacaagaatatcttcatcaatctgcagataacaatatagtactttataatattgaaacaggacaatcatataccattttgagtaatagaaccatgaaaagtgtgaatgcttcaaattacggcttatcacctgatcggcaatttgtatatctagaaagtgattattcaaagctttggagatactcttacacagcaacatattacatctatgaccttagcaatggagaatttgtaagaggaaatgagcttcctcgtccaattcagtatttatgctggtcgcctgttgggagtaaattagcatatgtctatcaaaacaatatctatttgaaacaaagaccaggagatccaccttttcaaataacatttaatggaagagaaaataaaatatttaatggaatcccagactgggtttatgaagaggaaatgcttgctacaaaatatgctctctggtggtctcctaatggaaaatttttggcatatgcggaatttaatgatacggatataccagttattgcctattcctattatggcgatgaacaatatcctagaacaataaatattccatacccaaaggctggagctaagaatcccgttgttcggatatttattatcgataccacttaccctgcgtatgtaggtccccaggaagtgcctgttccagcaatgatagcctcaagtgattattatttcagttggctcacgtgggttactgatgaacgagtatgtttgcagtggctaaaaagagtccagaatgtttcggtcctgtctatatgtgacttcagggaagactggcagacatgggattgtccaaagacccaggagcatatagaagaaagcagaactggatgggctggtggattctttgtttcaacaccagttttcagctatgatgccatttcgtactacaaaatatttagtgacaaggatggctacaaacatattcactatatcaaagacactgtggaaaatgctattcaaattacaagtggcaagtgggaggccataaatatattcagagtaacacaggattcactgttttattctagcaatgaatttgaagaataccctggaagaagaaacatctacagaattagcattggaagctatcctccaagcaagaagtgtgttacttgccatctaaggaaagaaaggtgccaatattacacagcaagtttcagcgactacgccaagtactatgcacttgtctgctacggcccaggcatccccatttccacccttcatgatggacgcactgatcaagaaattaaaatcctggaagaaaacaaggaattggaaaatgctttgaaaaatatccagctgcctaaagaggaaattaagaaacttgaagtagatgaaattactttatggtacaagatgattcttcctcctcaatttgacagatcaaagaagtatcccttgctaattcaagtgtatggtggtccctgcagtcagagtgtaaggtctgtatttgctgttaattggatatcttatcttgcaagtaaggaagggatggtcattgccttggtggatggtcgaggaacagctttccaaggtgacaaactcctctatgcagtgtatcgaaagctgggtgtttatgaagttgaagaccagattacagctgtcagaaaattcatagaaatgggtttcattgatgaaaaaagaatagccatatggggctggtcctatggaggatacgtttcatcactggcccttgcatctggaactggtcttttcaaatgtggtatagcagtggctccagtctccagctgggaatattacgcgtctgtctacacagagagattcatgggtctcccaacaaaggatgataatcttgagcactataagaattcaactgtgatggcaagagcagaatatttcagaaatgtagactatcttctcatccacggaacagcagatgataatgtgcactttcaaaactcagcacagattgctaaagctctggttaatgcacaagtggatttccaggcaatgtggtactctgaccagaaccacggcttatccggcctgtccacgaaccacttatacacccacatgacccacttcctaaagcagtgtttctctttgtcagac

SEQ ID NO: 5469 - DNA, 1971 bp, Homo Sapiens
cataaactcgtgtgttatttcaccaactgggcacacagtcggccaggccctgcctcgatcttgccccatgacctggacccctttctctgcacccacctgatatttgcctttgcctcaatgaacaacaatcagattgttgctaaggatctccaggatgagaaaattctctacccagagttcaacaaactaaaggagaggaacagagagctgaaaacactactgtccatcggcgggtggaactttggcacctcaagattcaccactatgttgtccacatttgccaaccgtgaaaagtttattgcttcagttatatcccttctgaggacacatgactttgatggtcttgaccttttcttcttatatcctggactaagaggcagccccatgcatgaccggtggacttttctcttcttaattgaagagctcctgtttgccttccggaaggaggcactgctcaccatgcgcccgaggctgctgctgtctgctgctgtttctggggtcccacacatcgtccaaacatcctatgatgtgcgctttctaggaagactcctggatttcatcaatgtcttgtcttatgacttacatggaagttgggaaaggttcacaggacataatagccccctcttctctctgcctgaagaccccaaatcttcggcatatgctatgaattattggagaaagcttggggcaccctcagagaagctcatcatggggatccccacctatggacgtacctttcgcctcctcaaagcctctaagaatgggttgcaggccagagcgatcggaccagcatctccagggaagtacaccaagcaagaaggcttcttggcttattttgagatttgttcctttgtctggggagcgaagaagcactggattgattaccagtatgtcccgtatgccaacaaggggaaagagtgggttggctatgacaatgccatcagcttcagttacaaggcatggtttataaggcgagagcattttgggggggccatggtgtggacattggacatggatgacgtcaggggcacgttctgtggcactggccctttcccccttgtctacgtattgaatgatatcctggtgcgggctgagttcagttcaacttctttaccacaattttggctgtcatctgctgtgaattcttcaagcactgaccctgaaaggctggctgtgaccacggcatggaccactgatagtaagattttgcccccaggaggagaggctggggtcactgagatccacggaaagtgtgaaaatatgactataacccctagaggtacaactgtgacccctacaaaggaaactgtatcccttggaaagcacactgtagctctaggagagaagactgagatcactggggcaatgaccatgacttctgtgggtcatcagtccatgacccctggagagaaggccctgacccctgtgggtcatcaatctgtgaccactggacagaagaccctgacctctgtgggttatcagtctgtgacccctggggaaaagaccctgacccctgtgggtcatcagtctgtgacccctgtgagtcatcagtctgtgagccctggaggaacgactatgacccctgtccattttcagactgagacccttagacagaatacagtggcccctagaaggaaggctgtggcccgtgaaaaggtgactgtcccctccagaaacatatcagtcacccctgaagggcagactatgcctttaagaggggagaatttgacttctgaggtgggcactcaccccaggatgggtaacttgggtcttcagatggaagctgaaaacaggatgatgctgtcctccagccccgtcatccagctcccggaacaaactcctctagcttttgacaaccgctttgttcccatctatggaaaccattcctctgtcaactcagtaacccctcaaacaagtcctctttctctaaaaaaagaaatcccagaaaactctgctgtggatgaagaagcc

SEQ ID NO: 5470 - DNA, 498 bp, Homo Sapiens
tctaagccaatagatgtttcccgtctggatcttcgaattggttgcatcataactgctagaaaacaccctgatgcagattctttgtatgtggaagaagtagatgtcggagaaatagccccaaggacagttgtcagtggcctggtgaatcatgttcctcttgaacagatgcaaaatcggatggtgattttactttgtaacctgaaacctgcaaagatgaggggagtattatctcaagcaatggtcatgtgtgctagttcaccagagaaaattgaaatcttggctcctccaaatgggtctgttcctggagacagaattacttttgatgctttcccaggagagcctgacaaggagctgaatcctaagaagaagatttgggagcagatccagcctgatcttcacactaatgatgagtgtgtggctacatacaaaggagttccctttgaggtgaaagggaagggagtatgtagggctcaaaccatgagcaacagtggaatcaaa

SEQ ID NO: 5471 - DNA, 1596 bp, Homo Sapiens
atgccccacgtcatccggatcggaggaatcttcgagtatgcggacggccccaacgcccaggtcatgaatgccgaggagcatgcctttcgattttctgccaacatcatcaacaggaacaggactctgctgcccaacacaaccttgacctatgacatacagaggattcacttccatgacagcttcgaggcgaccaaaaaggcctgtgaccagctggcactgggcgtggtggcgatcttcggcccatcacagggctcctgcaccaatgccgtccagtccatctgcaatgccctggaggtgccccacatccagctgcgttggaagcaccacccgctggacaacaaggacaccttctacgtgaacctctaccccgactacgcctcgctcagccatgccatcctcgacctggtccagtacctcaagtggcggtcagccaccgtggtctatgacgacagtacagggctcatccgactgcaggagctcatcatggccccatcaagatacaacatccgcctgaagatccgtcagctccccatcgactctgacgactcgcgccccttgctcaaggagatgaagcgaggccgggaattccgcattatcttcgactgcagccacactatggcggcccagatcctcaagcaggccatggccatgggcatgatgactgagtactaccacttcatcttcaccactctggatctctacgctttagacctggagccctaccgctactcaggcgtgaacctgacaggattccggattctcaatgtggacaacccacacgtctcggccattgtggagaagtggtccatggagcggctgcaggcagctccccggtccgagtctggcctgctggatggagtgatgatgactgatgcagccttactgtacgacgccgtccatatcgtgtccgtgtgctaccagcgggcaccacagatgaccgtgaactccctgcagtgccatcggcacaaggcctggcgctttggcggccgcttcatgaacttcatcaaggaggctcaatgggaaggattaactggacgaattgttttcaacaaaactagtggcttgcggacggattttgatctggacatcatcagcctgaaagaggatggcctggagaaggttggggtgtggagtcctgccgacgggctcaacatcactgaggttgccaaaggccgaggccctaatgtcaccgactctctgacaaacagatcactcattgtcaccacagtgctggaggagcccttcgtcatgtttcggaaatcagacaggacgctatacgggaatgaccggttcgagggctactgcatcgacctgctaaaggagctggcccacatccttggtttctcctatgagatccggctggtggaggacggcaagtacggggcacaggatgacaagggccagtggaacggcatggtcaaggagctcatcgaccacaaggcagatctggccgtggcccccctgaccatcacccatgttcgagagaaggccatcgacttctccaagcccttcatgacacttggtgtgagcatcctgtatcgaaagcccaatggcaccaaccccagcgtcttctccttcctcaatcccctgtcccca

SEQ ID NO: 5472 - DNA, 1500 bp, Homo Sapiens
caggaacagggagcgaggagcccctcggaggagcctccagaggaggaaatccccaaggaggatgggatcttggtgctgagccgccacaccctgggcctggccctgcgggagcaccctgccctgctggtggaattctatgccccgtggtgtgggcactgccaggccctggcccccgagtacagcaaggcagctgccgtgctcgcggccgagtcaatggtggtcacgctggccaaggtggatgggcccgcgcagcgcgagctggctgaggagtttggtgtgacggagtaccctacgctcaagttcttccgcaatgggaaccgcacgcacccggaggagtacacaggaccacgggacgctgagggcattgccgagtggctgcgacggcgggtggggcccagtgccatgcggctggaggacgaggcggccgcccaggcgctgatcggtggccgggacctagtggtcattggcttcttccaggacctgcaggacgaggacgtggccaccttcttggccttggcccaggacgccctggacatgacctttggcctcacagaccggccgcggctctttcagcagtttggcctcaccaaggacactgtggttctcttcaagaagtttgatgaggggcgggcagacttccccgtggacgaggagcttggcctggacctgggggatctgtcgcgcttcctggtcacacacagcatgcgcctggtcacggagttcaacagccagacgtctgccaagatcttcgcggccaggatcctcaaccacctgctgctgtttgtcaaccagacgctggctgcgcaccgggagctcctagcgggctttggggaggcagctccccgcttccgggggcaggtgctgttcgtggtggtggacgtggcggccgacaatgagcacgtgctgcagtactttggactcaaggctgaggcagcccccactctgcgcttggtcaaccttgaaaccactaagaagtatgcgcctgtggatgggggccctgtcaccgcagcgtccatcactgctttctgccatgcagtcctcaacggccaagtcaagccctatctcctgagccaggagataccccctgattgggatcagcggccagttaagaccctcgtgggcaagaattttgagcaggtggcttttgacgaaaccaagaatgtgtttgtcaagttctatgccccgtggtgcacccactgcaaggagatggcccctgcctgggaggcattggctgagaagtaccaagaccacgaggacatcatcattgctgagctggatgccacggccaacgagctggatgccttcgctgtgcacggcttccctactctcaagtacttcccagcagggccaggtcggaaggtgattgaatacaaaagcaccagggacctggagactttctccaagttcctggacaacgggggcgtgctgcccacggaggagcccccggaggagccagcagccccgttcccggagccaccggccaactccactatggggtcc

SEQ ID NO: 5473 - DNA, 1260 bp, Homo Sapiens
tttgactggcaatacataaatcctgttgcccatatgaaatcatcagcatgggtcaacaaaatacaagtactgatggctgctgcaagctttggccaaactaaaatcccccggggaaatgggccttattccgttggttgtacagacttaatgtttgatcacactaataagggcaccttcttgcgtttatattatccatcccaagataatgatcgccttgacaccctttggatcccaaataaagaatatttttggggtcttagcaaatttcttggaacacactggcttatgggcaacattttgaggttactctttggttcaatgacaactcctgcaaactggaattcccctctgaggcctggtgaaaaatatccacttgttgttttttctcatggtcttggggcattcaggacactttattctgctattggcattgacctggcatctcatgggtttatagttgctgctgtagaacacagagatagatctgcatctgcaacttactatttcaaggaccaatctgctgcagaaataggggacaagtcttggctctaccttagaaccctgaaacaagaggaggagacacatatacgaaatgagcaggtacggcaaagagcaaaagaatgttcccaagctctcagtctgattcttgacattgatcatggaaagccagtgaagaatgcattagatttaaagtttgatatggaacaactgaaggactctattgatagggaaaaaatagcagtaattggacattcttttggtggagcaacggttattcagactcttagtgaagatcagagattcagatgtggtattgccctggatgcatggatgtttccactgggtgatgaagtatattccagaattcctcagcccctcttttttatcaactctgaatatttccaatatcctgctaatatcataaaaatgaaaaaatgctactcacctgataaagaaagaaagatgattacaatcaggggttcagtccaccagaattttgctgacttcacttttgcaactggcaaaataattggacacatgctcaaattaaagggagacatagattcaaatgcagctattgatcttagcaacaaagcttcattagcattcttacaaaagcatttaggacttcataaagattttgatcagtgggactgcttgattgaaggagatgatgagaatcttattccagggaccaacattaacacaaccaatcaacacatcatgttacagaactcttcaggaatagagaaatacaat

SEQ ID NO: 5474 - DNA, 396 bp, Homo Sapiens
gtgctgctcaccaaaggtgaaattcgatgctactgtgatgctgcccactgtgtagccactggttatatgtgtaaatctgagctcagcgcctgcttctctagacttcttgatcctcagaactcaaattccccactcacccatggctgcctggactctcttgcaagcacgacagacatctgccaagccaaacaggcccgaaaccactctggcaccaccatacccacattggaatgctgtcatgaagacatgtgcaattacagagggctgcacgatgttctctctcctcccaggggtgaggcctcaggacaaggaaacaggtatcagcatgatggtagcagaaaccttatcaccaaggtgcaggagctgacttcttccaaagagttgtggttccgggca

SEQ ID NO: 5475 - DNA, 702 bp, Homo Sapiens
tgggagacagaggagaggccccggactcgcgaagaggagtgccacttctacgcgggtggacaagtgtacccgggagaggcatcccgggtatcggtcgccgaccactccctgcacctaagcaaagcgaagatttccaagccagcgccctactgggaaggaacagctgtgatcgatggagaatttaaggagctgaagttaactgattatcgtgggaaatacttggttttcttcttctacccacttgatttcacatttgtgtgtccaactgaaattatcgcttttggcgacagacttgaagaattcagatctataaatactgaagtggtagcatgctctgttgattcacagtttacccatttggcctggattaatacccctcgaagacaaggaggacttgggccaataaggattccacttctttcagatttgacccatcagatctcaaaggactatggtgtatacctagaggactcaggccacactcttagaggtctcttcattattgatgacaaaggaatcctaagacaaattactctgaatgatcttcctgtgggtagatcagtggatgagacactacgtttggttcaagcattccagtacactgacaaacacggagaagtctgccctgctggctggaaacctggtagtgaaacaataatcccagatccagctggaaagctgaagtatttcgataaactgaat

SEQ ID NO: 5476 - DNA, 1419 bp, Homo Sapiens
ggagtaaatgcagatgttgagaaacatcttgaattgggcaagaaattacttgcagctggacagctagctgatgctttatctcagtttcatgctgccgtagatggtgaccctgataactatattgcttattatcggagggctactgtctttttagctatgggcaaatcaaaagctgcacttcctgatttaactaaagtgattcaattgaagatggacttcactgcagcaagattacagagaggtcacttattactcaaacaaggaaaacttgatgaagcagaagatgattttaaaaaagtgctcaaatctaatccaagtgaaaatgaagaaaaggaagcacagtctcaacttataaaatctgatgaaatgcagcgtttgcgttcacaagcacttaacgcttttggaagtggagattatactgctgctatagccttccttgataagattttagaggtttgtgtttgggatgcagaactacgggaacttcgagctgaatgttttataaaagaaggagaacctaggaaagctataagtgacttaaaagctgcgtcaaagttgaagaatgataatactgaagcgttttataaaataagcacactgtactaccaactaggagaccacgaactgtccctcagtgaagttcgggaatgtcttaaacttgaccaggatcataaaaggtgttttgcacactataaacaagtaaagaaacttaataagctgattgagtcagctgaagagctcatcagagatggcagatacacagatgctaccagcaaatatgaatctgtcatgaaaacagagccaagcattgctgaatatacagttcgttcaaaggagaggatttgccactgcttttctaaggacgagaagcctgttgaagctattagggtttgttctgaagttttacagatggaacctgacaatgtgaatgccctgaaagatcgagcagaggcctatttgatagaggaaatgtatgatgaagctattcaggattatgaaactgctcaggaacacaatgaaaatgatcagcagattcgagaaggtctagagaaagcacaaagattattgaaacagtcgcagaaacgagattattataaaatcttgggagtaaaaagaaatgccaaaaagcaagaaattattaaagcataccgaaaattagcactgcagtggcacccagataacttccagaatgaagaagaaaagaaaaaagctgagaaaaagttcattgatatagcagctgctaaagaagtcctctctgatccagaaatgagaaagaagtttgacgacggagaagatcctttggatgcagagagccagcaaggaggcggcggcaaccctttccacagaagctggaactcatggcaagggttcaatcccttcagctcaggcggaccatttagatttaaattccacttcaat

SEQ ID NO: 5477 - DNA, 1335 bp, Homo Sapiens
gcaaaactggtctgctacttcaccaactgggcccagtacagacagggggaggctcgcttcctgcccaaggacttggaccccagcctttgcacccacctcatctacgccttcgctggcatgaccaaccaccagctgagcaccactgagtggaatgacgagactctctaccaggagttcaatggcctgaagaagatgaatcccaagctgaagaccctgttagccatcggaggctggaatttcagcactcagaagttcacagatatggtagccacggccaacaaccgtcagacctttgtcaactcggccatcaggtttctgcgcaaatacagctttgacggccttgaccttgactgggagtacccaggaagccaggggagccctgccgtagacaaggagcgcttcacaaccctggtacaggacttggccaatgccttccagcaggaagcccagacctcagggaaggaacgccttcttctgagtgcagcggttccagctgggcagacctatgtggatgctggatacgaggtggacaaaatcgcccagaacctggattttgtcaaccttatggcctacgacttccatggctcttgggagaaggtcacgggacataacagccccctctacaagaggcaagaagagagtggtgcagcagccagcctcaacgtggatgctgctgtgcaacagtggctgcagaaggggacccctgccagcaagctgatccttggcatgcctacctacggacgctccttcacactggcctcctcatcagacaccagagtgggggccccagccacagggtctggcactccaggccccttcaccaaggaaggagggatgctggcctactatgaagtctgctcctggaagggggccaccaaacagagaatccaggatcagaaggtgccctacatcttccgggacaaccagtgggtgggctttgatgatgtggagagcttcaaaaccaaggtcagctatctgaagcagaagggactgggcggggccatggtctgggcactggacttagatgactttgccggcttctcctgcaaccagggccgataccccctcatccagacgctacggcaggaactgagtcttccatacttgccttcaggcaccccagagcttgaagttccaaaaccaggtcagccctctgaacctgagcatggccccagccctggacaagacacgttctgccagggcaaagctgatgggctctatcccaatcctcgggaacggtccagcttctacagctgtgcagcggggcggctgttccagcaaagctgcccgacaggcctggtgttcagcaactcctgcaaatgctgcacctggaat

SEQ ID NO: 5478 - DNA, 615 bp, Homo Sapiens
cagcactatctccacatccgcccggcacccagcgacaacctgcccctggtggacctcatcgaacacccagaccctatctttgaccccaaggaaaaggatctgaacgagacgctgctgcgctcgctgctcgggggccactacgacccaggcttcatggccacctcgccccccgaggaccggcccggcgggggcgggggtgcagctgggggcgcggaggacctggcggagctggaccagctgctgcggcagcggccgtcgggggccatgccgagcgagatcaaagggctagagttctccgagggcttggcccagggcaagaagcagcgcctaagcaagaagctgcggaggaagttacagatgtggctgtggtcgcagacattctgccccgtgctgtacgcgtggaacgacctgggcagccgcttttggccgcgctacgtgaaggtgggcagctgcttcagtaagcgctcgtgctccgtgcccgagggcatggtgtgcaagccgtccaagtccgtgcacctcacggtgctgcggtggcgctgtcagcggcgcgggggccagcgctgcggctggattcccatccagtaccccatcatttccgagtgcaagtgctcgtgc

SEQ ID NO: 5479 - DNA, 225 bp, Homo Sapiens
ggctctggctgccccttattggagaatgtgatttccaagacaatcaatccacaagtgtctaagactgaatacaaagaacttcttcaagagttcatagacgacaatgccactacaaatgccatagatgaattgaaggaatgttttcttaaccaaacggatgaaactctgagcaatgttgaggtgtttatgcaattaatatatgacagcagtctttgtgatttattt

SEQ ID NO: 5480 - DNA, 1491 bp, Homo Sapiens
ctcccagtaaccaggtatcaaaataatgaatctgaggattctgaagaatggaagggtcatttggctcaggcaccaacaccacccttggagagcagtgagtcatcagaaggcagtaaagttagctcagaggaacaggcaaatgaagaccccagtgacagcactcagtcagaggagggcctgggctctgatgatcatcaatacatttataggctagctggtggcttctccaggagcacaggaaaaggaggagatgataaagatgacgatgaagatgacagtggagatgacacctttggtgacgatgacagtggcccagggcccaaagacagacaagaaggaggaaactccagactgggaagtgatgaggactctgatgacaccatacaagccagtgaagagagtgccccacaagggcaagacagtgcccaagataccaccagtgagagcagggaacttgacaatgaggaccgggtggacagcaagcctgagggaggtgactccactcaagagagtgagagtgaagagcactgggtgggaggtggcagtgatggggagagcagccatggagacggctccgagttggacgatgagggaatgcagagtgatgacccagagagcatcaggagtgaaaggggaaactccagaatgaacagtgcaggcatgaaatcaaaagaatctggagaaaacagtgagcaagcaaacactcaagattcaggtggcagccaattgctggagcatcccagtaggaaaatttttaggaagtctcgcatctcagaggaagatgacagaagcgagcttgatgacaacaacacaatggaagaagtcaagagtgactctacagaaaacagcaactccagagacactggcctcagccaacccaggagagacagcaagggtgactctcaagaagacagcaaggagaatctgtcccaggaagagagccaaaacgtagatggtcccagcagtgagtccagccaagaggccaacctgtcatctcaagagaacagcagtgagtctcaggaagaggtggtgagtgagtccaggggagataaccccgaccccacaactagttatgtagaagaccaggaagacagtgactccagcgaggaggacagctcgcacacactctcccactcaaaaagtgaatccagagaggagcaagcagacagtgaatccagtgaaagcctcaacttctcagaggaaagcccggagtcccctgaggatgagaacagctccagccaggagggcctccagtctcacagcagctcagcagagagtcagagcgaggaaagccattctgaggaagacgacagtgactctcaagacagcagcagatccaaagaagatagcaactccacggagagcaaatcaagcagtgaggaagatggccagttgaaaaacattgagatagagagccggaaattaacagttgatgcctatcacaacaaacccattggggaccaagatgacaatgactgccaagacggctat

SEQ ID NO: 5481 - DNA, 456 bp, Homo Sapiens
atacccctgggggtcaatagtcaacgaggagacgatgtgactcaagcgactccagaaacattcacagaagatcctaatctggtgaatgatcccgctacagatgaaacagttttggctgttttggctgatattgcaccttccacagatgacttggcctccctcagtgaaaaaaataccactgcagagtgctgggatgagaaatttacctgcacaaggctctactctgtgcatcggccggttaaacaatgcattcatcagttatgcttcaccagtttacgacgtatgtacatcgtcaacaaggagatctgctctcgtcttgtctgtaaggaacacgaagctatgaaagatgagctttgccgtcagatggctggtctgccccctaggagactccgtcgctccaattacttccgacttcctccctgtgaaaatgtggatttgcagagacccaatggtctg

SEQ ID NO: 5482 - DNA, 909 bp, Homo Sapiens
gaagtggagaagacagcctgtccttcaggcaagaaggctcccgagatagacgagagcctcatcttctacaagaagtgggagctggaagcctgcgtggatgcggccctgctggccacccagatggaccgcgtgaacgccatccccttcacctacgagcagctggacgtcctaaagcataaactggatgagctctacccacaaggttaccccgagtctgtgatccagcacctgggctacctcttcctcaagatgagccctgaggacattcgcaagtggaatgtgacgtccctggagaccctgaaggctttgcttgaagtcaacaaagggcacgaaatgagtcctcaggtggccaccctgatcgaccgctttgtgaagggaaggggccagctagacaaagacaccctagacaccctgaccgccttctaccctgggtacctgtgctccctcagccccgaggagctgagctccgtgccccccagcagcatctgggcggtcaggccccaggacctggacacgtgtgacccaaggcagctggacgtcctctatcccaaggcccgccttgctttccagaacatgaacgggtccgaatacttcgtgaagatccagtccttcctgggtggggcccccacggaggatttgaaggcgctcagtcagcagaatgtgagcatggacttggccacgttcatgaagctgcggacggatgcggtgctgccgttgactgtggctgaggtgcagaaacttctgggaccccacgtggagggcctgaaggcggaggagcggcaccgcccggtgcgggactggatcctacggcagcggcaggacgacctggacacgctggggctggggctacagggcggcatccccaacggctacctggtcctagacctcagcatgcaagaggccctctcg

SEQ ID NO: 5483 - DNA, 1761 bp, Homo Sapiens
ggcggtgtcgggagcctgaacctggaggagctgagtgagatgcgttatgggatcgagatcctgccgttgcctgtcatgggagggcagagccaatcttcggacgtggtgattgtctcctctaagtacaaacagcgctatgagtgtcgcctgccagctggagctattcacttccagcgtgaaagggaggaggaaacacctgcttaccaagggcctgggatccctgagttgttgagcccaatgagagatgctccctgcttgctgaagacaaaggactggtggacatatgaattctgttatggacgccacatccagcaataccacatggaagattcagagatcaaaggtgaagtcctctatctcggctactaccaatcagccttcgactgggatgatgaaacagccaaggcctccaagcagcatcgtcttaaacgctaccacagccagacctatggcaatgggtccaagtgcgaccttaatgggaggccccgggaggccgaggttcggttcctctgtgacgagggtgcaggtatctctggggactacatcgatcgcgtggacgagcccttgtcctgctcttatgtgctgaccattcgcactcctcggctctgcccccaccctctcctccggcccccacccagtgctgcaccgcaggccatcctctgtcacccttccctacagcctgaggagtacatggcctacgttcagaggcaagccgactcaaagcagtatggagataaaatcatagaggagctgcaagatctaggcccccaagtgtggagtgagaccaagtctggggtggcaccccaaaagatggcaggtgcgagcccgaccaaggatgacagtaaggactcagatttctggaagatgcttaatgagccagaggaccaggccccaggaggggaggaggtgccggctgaggagcaggacccaagccctgaggcagcagattcagcttctggtgctcccaatgattttcagaataacgtgcaggtcaaagtcattcgaagccctgcggatttgattcgattcatagaggagctgaaaggtggaacaaaaaaggggaagccaaatataggccaagagcagcctgtggatgatgctgcagaagtccctcagagggaaccagagaaggaaaggggtgatccagaacggcagagagagatggaagaagaggaggatgaggatgaggatgaggatgaagatgaggatgaacggcagttactgggagaatttgagaaggaactggaagggatcctgcttccgtcagaccgagaccggctccgttcggaggtgaaggctggcatggagcgggaactggaaaacatcatccaggagacagagaaagagctggacccagatgggctgaagaaggagtcagagcgggatcgggcaatgctggctctcacatccactctcaacaaactcatcaaaagactggaggaaaaacagagtccagagctggtgaagaagcacaagaaaaagagggttgtccccaaaaagcctcccccatcaccccaacctacagggaaaattgagatcaaaattgtccgcccatgggctgaagggactgaagagggtgcacgttggctgactgatgaggacacgagaaacctcaaggagatcttcttcaatatcttggtgccgggagctgaagaggcccagaaggaacgccagcggcagaaagagctggagagcaattaccgccgggtgtggggctctccaggtggggagggcacaggggacctggacgaatttgacttc

SEQ ID NO: 5484 - DNA, 513 bp, Homo Sapiens
gcggggcccccgccaatccaggacggtgagttcacgttcctgttgccggcggggaggaagcagtgtttctaccagtccgcgccggccaacgcaagcctcgagaccgaataccaggtgatcggaggtgctggactggacgtggacttcacgctggagagccctcagggcgtgctgttggtcagcgagtcccgcaaggctgatggggtacacacggtggagccaacggaggccggggactacaagctgtgctttgacaactccttcagcaccatctccgagaagctggtgttctttgaactgatctttgacagcctccaggatgacgaggaggtcgaaggatgggcagaggctgtggagcccgaggagatgctggatgttaaaatggaggacatcaaggagtccattgagaccatgcggacccggctggagcgcagcatccagatgctcacgctactgcgggccttcgaggcacgtgaccgcaacctgcaagagggcaacttggagcgggtcaac

SEQ ID NO: 5485 - DNA, 636 bp, Homo Sapiens
gcgtccaaggccccggtgtgccaggaaatcacggtgcccatgtgccgcggcatcggctacaacctgacgcacatgcccaaccagttcaaccacgacacgcaggacgaggcgggcctggaggtgcaccagttctggccgctggtggagatccaatgctcgccggacctgcgcttcttcctatgctctatgtacacgcccatctgtctgcccgactaccacaagccgctgccgccctgccgctcggtgtgcgagcgcgccaaggccggctgctcgccgctgatgcgccagtacggcttcgcctggcccgagcgcatgagctgcgaccgcctcccggtgctgggccgcgacgccgaggtcctctgcatggattacaaccgcagcgaggccaccacggcgccccccaggcctttcccagccaagcccacccttccaggcccgccaggggcgccggcctcggggggcgaatgccccgctgggggcccgttcgtgtgcaagtgtcgcgagcccttcgtgcccattctgaaggagtcacacccgctctacaacaaggtgcggacgggccaggtgcccaactgcgcggtaccctgctaccagccgtccttcagtgccgacgagcgcacgttcgccaccttctgg

SEQ ID NO: 5486 - DNA, 153 bp, Homo Sapiens
acagccagattcctagctttccttcaggcaacgaaggcacaacagtatgtggacagttacgtccaagagagtgacctcagtgaagtgacactcccaccagagatacagtatttcacttatgctagagataaatggctcccttctgaccctcag

SEQ ID NO: 5487 - DNA, 1008 bp, Homo Sapiens
gaagtgttagacatggcagataatgcatttgatgatgaatacctgaaatgtacggacaggatggaaattaaatacgttccccaactgctaaaggaggaaaaagcaagccaccagcaattagatactgtgtgggaaaatgcaaaagccaaatgggcagcccgaaagactcaaatctttctccctatgaattttaaggataaccatggaatagccctgatggcatatatttccgaagctcaagagcaaactcccttttaccatctgttcagtgaagctgtgaagatggctggccaatctcgagaagattatatctatggcttccagttcaaagctttccacttttacctcacaagagccctgcagttgctgagaaaaccttgtgaggccagttccaaaactgtggtatatagaacaagccagggcacttcatttacatttggagggctaaaccaagccaggtttggccattttaccttggcatattcagccaaacctcaggctgctaatgaccagctcactgtgttatccatctacacatgccttggagttgacattgaaaattttcttgataaagaaagtgaaagaattactttaatacctctgaatgaggtttttcaagtgtcacaggagggggctggcaataaccttatccttcaaagcataaacaagacctgcagccattatgagtgtgcatttctaggtggactaaaaaccgaaaactgtattgagaacctagaatattttcaacccatctatgtctacaaccctggtgagaaaaaccagaagcttgaagaccatagtgagaaaaactggaagcttgaagaccatggtgagaaaaaccagaagcttgaagaccatggtgtgaaaatccttgaacccacccaaatacctggaatgaaaattccagaaccttttccactacctgaagataaaagtcaaggaaatatcaacaatcctactccaggtccagttcctgttccaggtcccaaaagccatccttctgcatcc

SEQ ID NO: 5488 - DNA, 288 bp, Homo Sapiens
atgggggctgtgctgggtgtcttctccctcgccagctgggttccatgcctctgcagcggtgcctcatgtttgctgtgtagttgctgtcctaacagtaagaattccacggtgactcgcctcatttatgctttcattctcctcctgagcactgtcgtatcctatatcatgcagagaaaagagatggaaacttacttgaagaagattcctggattttgtgaagggggatttaaaatccatgaggctgatataaatgcagataaagattgtgatgtgctggttggttataaa

SEQ ID NO: 5489 - DNA, 681 bp, Homo Sapiens
atgagctccaatgtgtactactacacccggatgatgtcacagctcttcctagacacccccgtgtccaaaacggagaaaactaactttaaaactctgtcttccatggaagacttctggaagttcacagaaggctccttattggatgggctgtactggaagatgcagcccagcaaccagactgaagctgacaaccgaagtttcatcttctatgagaacctgctgttaggggttccacgaatacggcaactccgagtcagaaatggatcctgctctatcccccaggacttgagagatgaaattaaagagtgctatgatgtctactctgtcagtagtgaagatagggctccctttgggccccgaaatggaaccgcttggatctacacaagtgaaaaagacttgaatggtagtagccactggggaatcattgcaacttatagtggagctggctattatctggatttgtcaagaacaagagaggaaacagctgcacaagttgctagcctcaagaaaaatgtctggctggaccgaggaaccagggcaacttttattgacttctcagtgtacaacgccaacattaacctgttctgtgtggtcaggttattggttgaattcccagcaacaggtggtgtgattccatcttggcaatttcagcctttaaagctgatccgatatgtcacaact

SEQ ID NO: 5490 - DNA, 855 bp, Homo Sapiens
atgaggatctgctccttcaacgtcaggtcctttggggaaagcaagcaggaagacaagaatgccatggatgtcattgtgaaggtcatcaaacgctgtgacatcatactcgtgatggaaatcaaggacagcaacaacaggatctgccccatactgatggagaagctgaacagaaattcaaggagaggcataacgtacaactatgtgattagctctcggcttggaagaaacacatataaagaacaatatgcctttctctacaaggaaaagctggtgtctgtgaagaggagttatcactaccatgactatcaggatggagacgcagatgtgttttccagggagccctttgtggtctggttccaatctccccacactgctgtcaaagacttcgtgattatccccctgcacaccaccccagagacatccgttaaggagatcgatgagttggttgaggtctacacggacgtgaaacaccgctggaaggcggagaatttcattttcatgggtgacttcaatgccggctgcagctacgtccccaagaaggcctggaagaacatccgcttgaggactgaccccaggtttgtttggctgatcggggaccaagaggacaccacggtgaagaagagcaccaactgtgcatatgacaggattgtgcttagaggacaagaaatcgtcagttctgttgttcccaagtcaaacagtgtttttgacttccagaaagcttacaagctgactgaagaggaggccctggatgtcagcgaccactttccagttgaatttaaactacagtcttcaagggccttcaccaacagcaaaaaatctgtcactctaaggaagaaaacaaagagcaaacgctcc

SEQ ID NO: 5491 - DNA, 357 bp, Homo Sapiens
tctgggcgtggggaggctgagacacgggagtgcatctactacaacgccaactgggagctggagcgcaccaaccagagcggcctggagcgctgcgaaggcgagcaggacaagcggctgcactgctacgcctcctggcgcaacagctctggcaccatcgagctcgtgaagaagggctgctggctagatgacttcaactgctacgataggcaggagtgtgtggccactgaggagaacccccaggtgtacttctgctgctgtgaaggcaacttctgcaacgagcgcttcactcatttgccagaggctgggggcccggaagtcacgtacgagccacccccgacagcccccaccctgctcacg

SEQ ID NO: 5492 - DNA, 486 bp, Homo Sapiens
tccctcccgacagaggactgtgagaatgagaaggagcaagctgtgcacaatgtagtccagctgctgccaggagtgggaaccttctacaacctgggcacagctttgtattatgctactcaaaactgcctgggcaaggccagggaacgaggccgagatggggccatagatctgggatatgaccttctgatgaccatggctgggatgtcaggggggcctatgggtctagcgatcagtgctgcacttaaacctgcattaaggtctggggttcagcagttgatccagtattaccaagatcagaaagacgcaaacatctctcagccggagaccaccaaggagggtttgagggccatctcagatgtgagtgacttggaagaaacaactactctggcttctttcatatcagaagtagtaagttcagctccctactgggggtgggccataatcaagagctatgacttagatcctggggctgggagtcttgagata

SEQ ID NO: 5493 - DNA, 2484 bp, Homo Sapiens
gcagaaggatgggaggaaggtcctcctacagtgctatcagactccccctggaccaacatctccggatcttgcaagggcaggtgctttgaacttcaagaggctggacctcctgattgtcgctgtgacaacttgtgtaagagctataccagttgctgccatgactttgatgagctgtgtttgaagacagcccgtggctgggagtgtactaaggacagatgtggagaagtcagaaatgaagaaaatgcctgtcactgctcagaggactgcttggccaggggagactgctgtaccaattaccaagtggtttgcaaaggagagtcgcattgggttgatgatgactgtgaggaaataaaggccgcagaatgccctgcagggtttgttcgccctccattaatcatcttctccgtggatggcttccgtgcatcatacatgaagaaaggcagcaaagtcatgcctaatattgaaaaactaaggtcttgtggcacacactctccctacatgaggccggtgtacccaactaaaacctttcctaacttatacactttggccactgggctatatccagaatcacatggaattgttggcaattcaatgtatgatcctgtatttgatgccacttttcatctgcgagggcgagagaaatttaatcatagatggtggggaggtcaaccgctatggattacagccaccaagcaaggggtgaaagctggaacattcttttggtctgttgtcatccctcacgagcggagaatattaaccatattgcagtggctcaccctgccagatcatgagaggccttcggtctatgccttctattctgagcaacctgatttctctggacacaaatatggccctttcggccctgagatgacaaatcctctgagggaaatcgacaaaattgtggggcaattaatggatggactgaaacaactaaaactgcatcggtgtgtcaacgtcatctttgtcggagaccatggaatggaagatgtcacatgtgatagaactgagttcttgagtaattacctaactaatgtggatgatattactttagtgcctggaactctaggaagaattcgatccaaatttagcaacaatgctaaatatgaccccaaagccattattgccaatctcacgtgtaaaaaaccagatcagcactttaagccttacttgaaacagcaccttcccaaacgtttgcactatgccaacaacagaagaattgaggatatccatttattggtggaacgcagatggcatgttgcaaggaaacctttggatgtttataagaaaccatcaggaaaatgctttttccagggagaccacggatttgataacaaggtcaacagcatgcagactgtttttgtaggttatggcccaacatttaagtacaagactaaagtgcctccatttgaaaacattgaactttacaatgttatgtgtgatctcctgggattgaagccagctcctaataatgggacccatggaagtttgaatcatctcctgcgcactaataccttcaggccaaccatgccagaggaagttaccagacccaattatccagggattatgtaccttcagtctgattttgacctgggctgcacttgtgatgataaggtagagccaaagaacaagttggatgaactcaacaaacggcttcatacaaaagggtctacagaagagagacacctcctctatgggcgacctgcagtgctttatcggactagatatgatatcttatatcacactgactttgaaagtggttatagtgaaatattcctaatgccactctggacatcatatactgtttccaaacaggctgaggtttccagcgttcctgaccatctgaccagttgcgtccggcctgatgtccgtgtttctccgagtttcagtcagaactgtttggcctacaaaaatgataagcagatgtcctacggattcctctttcctccttatctgagctcttcaccagaggctaaatatgatgcattccttgtaaccaatatggttccaatgtatcctgctttcaaacgggtctggaattatttccaaagggtattggtgaagaaatatgcttcggaaagaaatggagttaacgtgataagtggaccaatcttcgactatgactatgatggcttacatgacacagaagacaaaataaaacagtacgtggaaggcagttccattcctgttccaactcactactacagcatcatcaccagctgtctggatttcactcagcctgccgacaagtgtgacggccctctctctgtgtcctccttcatcctgcctcaccggcctgacaacgaggagagctgcaatagctcagaggacgaatcaaaatgggtagaagaactcatgaagatgcacacagctagggtgcgtgacattgaacatctcaccagcctggacttcttccgaaagaccagccgcagctacccagaaatcctgacactcaagacatacctgcatacatatgagagcgagatt

SEQ ID NO: 5494 - DNA, 1977 bp, Homo Sapiens
cagagagtgggactccccggcccccccggccccccagggccgcccgggaagcccggccaggacggcattgacggagaagctggtcctccaggtctgcctgggcccccgggaccaaagggggccccaggaaagccggggaaaccaggagaggctgggctgccgggactgccgggtgtggatggtctgactggacgagatggaccccctggacccaagggtgcccctggggaacggggaagtctgggacccccggggccgcccgggctggggggcaaaggcctccctggaccccccggagaggcaggagtgagcggccccccaggtgggatcggcctccgcggccccccgggaccttctggactccccggcctccctggtcccccaggacctcccggaccccctggacacccaggagtcctccctgaaggcgctactgaccttcagtgcccaagtatctgcccgccaggtcccccagggccccctggaatgccagggttcaagggacccactggctacaaaggcgagcagggggaagtcggcaaggacggcgagaagggtgaccctggcccccctgggcccgccggcctcccgggcagcgtggggctgcagggcccccggggattacgaggactgccagggccactcgggccccctggggaccggggtcccattgggttccgagggccgcctgggatcccaggagcgcctgggaaagcgggtgaccgaggcgagaggggcccagaagggttccgcggccccaagggtgacctcggcagacctggtcccaagggaacccccggagtggccgggccaagcggagagccgggcatgccgggcaaggacggccagaatggcgtgccaggactcgatggccagaagggagaggctggtcgcaacggtgctccgggagagaagggccccaacgggctgccgggcctccctggacgagcggggtccaaaggcgagaagggagaacggggcagagctggggagctgggtgaggccggcccctctggagagccaggcgtccctggagatgctggcatgcctggggagcgcggtgaggctggccaccggggctcagcgggggccctcggcccacaaggccctcccggagcccctggtgtccgaggcttccagggccagaagggcagcatgggagaccccggccttccaggcccccagggcctccgaggtgacgtgggcgaccggggtccgggaggtgccgcaggccctaagggagaccagggtattgcaggttccgacggtcttcctggggataaaggagaactgggtcccagcggcctggtcggacccaaaggagagtctggcagtcgaggggagctgggccccaaaggcacccagggtcccaacggcaccagcggtgttcagggtgtccccgggccccccggtcctctgggcctgcagggcgtcccgggtgttcctggcatcacggggaagccgggagttccggggaaggaggccagcgagcagcgcatcagggagctgtgtggggggatgatcagcgaacaaattgcacagttagccgcgcacctaaggaagcctttggcacccgggtccattggtcggcccggtccagctggcccccctgggcccccaggacccccaggctccattggtcaccctggcgctcgaggaccccccggataccgcggtcccactggggagctgggagaccccgggcccagaggaaaccagggtgacagaggagacaaaggcgcggcaggagcagggctggacgggcctgaaggagaccaggggccccaaggaccccaaggcgtgcccggcaccagcaaggacggccaggacggtgctcccggcgagcctgggcctcccggagatcctgggcttccaggtgccattggggcccaggggacaccggggatctgcgacacctcagcctgccaaggagccgtgttaggaggggtcggggagaaatcaggctctcgaagctca

SEQ ID NO: 5495 - DNA, 879 bp, Homo Sapiens
ttgcagctgtgggacacctgggcagatgaagccgagaaagccttgggtcccctgcttgcccgggaccggagacaggccaccgaatatgagtacctagattatgatttcctgccagaaacggagcctccagaaatgctgaggaacagcactgacaccactcctctgactgggcctggaacccctgagtctaccactgtggagcctgctgcaaggcgttctactggcctggatgcaggaggggcagtcacagagctgaccacggagctggccaacatggggaacctgtccacggattcagcagctatggagatacagaccactcaaccagcagccacggaggcacagaccactccactggcagccacagaggcacagacaactcgactgacggccacggaggcacagaccactccactggcagccacagaggcacagaccactccaccagcagccacggaagcacagaccactcaacccacaggcctggaggcacagaccactgcaccagcagccatggaggcacagaccactgcaccagcagccatggaagcacagaccactccaccagcagccatggaggcacagaccactcaaaccacagccatggaggcacagaccactgcaccagaagccacggaggcacagaccactcaacccacagccacggaggcacagaccactccactggcagccatggaggccctgtccacagaacccagtgccacagaggccctgtccatggaacctactaccaaaagaggtctgttcatacccttttctgtgtcctctgttactcacaagggcattcccatggcagccagcaatttgtccgtcaactacccagtgggggccccagaccacatctctgtgaagcagtgc

SEQ ID NO: 5496 - DNA, 885 bp, Homo Sapiens
ggcaaggccgaggagctgcactacccgctgggcgagcgccgcagcgactacgaccgcgaggcgctgctgggcgtccaggaagatgtggatgaatatgttaaactcggccacgaagagcagcaaaaaagactgcaggcgatcataaagaaaatcgacttggactcagatggctttctcactgaaagtgaactcagttcatggattcagatgtcttttaagcattatgctatgcaagaagcaaaacaacagtttgttgaatatgataaaaacagtgatgatactgtgacttgggatgaatataacattcagatgtatgatcgtgtgattgactttgatgagaacactgctctggatgatgcagaagaggagtcctttaggaagcttcacttaaaggacaagaagcgatttgaaaaagctaaccaggattcaggtcccggtttgagtcttgaagaatttattgcttttgagcatcctgaagaagttgattatatgacggaatttgtcattcaagaagctttagaagaacatgacaaaaatggtgatggatttgttagtttggaagaatttcttggtgattacaggtgggatccaactgcaaatgaagatccagaatggatacttgttgagaaagacagattcgtgaatgattatgacaaagataacgatggcaggcttgatccccaagagctgttaccttgggtagtacctaataatcagggcattgcacaagaggaggcacttcatctaattgatgaaatggatttgaatggtgacaaaaagctctctgaagaagagattctggaaaacccggacttgtttctcaccagtgaagccacagattatggcagacagctccatgatgactatttctatcatgatgagctt

SEQ ID NO: 5497 - DNA, 1248 bp, Homo Sapiens
aacaatgaaacagaggaaattaaagatgaaagagcaaaggatgtctgcccagtgagactagaaagcagagggaaatgcgaagaggcaggggagtgcccctaccaggtaagcctgccccccttgactattcagctcccgaagcaattcagcaggatcgaggaggtgttcaaagaagtccaaaacctcaaggaaatcgtaaatagtctaaagaaatcttgccaagactgcaagctgcaggctgatgacaacggagacccaggcagaaacggactgttgttacccagtacaggagccccgggagaggttggtgataacagagttagagaattagagagtgaggttaacaagctgtcctctgagctaaagaatgccaaagaggagatcaatgtacttcatggtcgcctggagaagctgaatcttgtaaatatgaacaacatagaaaattatgttgacagcaaagtggcaaatctaacatttgttgtcaatagtttggatggcaaatgttcaaagtgtcccagccaagaacaaatacagtcacgtccagttcaacatctaatatataaagattgctctgactactacgcaataggcaaaagaagcagtgagacctacagagttacacctgatcccaaaaatagtagctttgaagtttactgtgacatggagaccatggggggaggctggacagtgctgcaggcacgtctcgatgggagcaccaacttcaccagaacatggcaagactacaaagcaggctttggaaacctcagaagggaattttggctggggaacgataaaattcatcttctgaccaagagtaaggaaatgattctgagaatagatcttgaagactttaatggtgtcgaactatatgccttgtatgatcagttttatgtggctaatgagtttctcaaatatcgtttacacgttggtaactataatggcacagctggagatgcattacgtttcaacaaacattacaaccacgatctgaagtttttcaccactccagataaagacaatgatcgatatccttctgggaactgtgggctgtactacagttcaggctggtggtttgatgcatgtctttctgcaaacttaaatggcaaatattatcaccaaaaatacagaggtgtccgtaatgggattttctggggtacctggcctggtgtaagtgaggcacaccctggtggctacaagtcctccttcaaagaggctaagatgatgatcagacccaagcactttaagcca

SEQ ID NO: 5498 - DNA, 573 bp, Homo Sapiens
gtccaaaccgttccgttatccaggctttttgaccacgctatgctccaagcccatcgcgcgcaccagctggccattgacacctaccaggagtttgaagaaacctatatcccaaaggaccagaagtattcattcctgcatgactcccagacctccttctgcttctcagactctattccgacaccctccaacatggaggaaacgcaacagaaatccaatctagagctgctccgcatctccctgctgctcatcgagtcgtggctggagcccgtgcggttcctcaggagtatgttcgccaacaacctggtgtatgacacctcggacagcgatgactatcacctcctaaaggacctagaggaaggcatccaaacgctgatggggaggctggaagacggcagccgccggactgggcagatcctcaagcagacctacagcaagtttgacacaaactcacacaaccatgacgcactgctcaagaactacgggctgctctactgcttcaggaaggacatggacaaggtcgagacattcctgcgcatggtgcagtgccgctctgtagagggtagctgtggcttc

SEQ ID NO: 5499 - DNA, 366 bp, Homo Sapiens
aacaacatttactggagagaattcataaaacttcattacttaagtccaagtcgagaattcaaagagtacaaatgtgatgtcctcatgagagaaaaagaggctctgaaaggcaagagctttcatatgttcatctatagcttatggttcaaaattcagcgtgcatgcatcaatgagaaggggagcgaccgatatagaaatgcatatgtatgggccccaggtgccctcaaagtactcgagtgtcactgggagaagtacaacaataggtacacagagagcagaagcttcagctacattgaattccattgtggcgtagatggatatgttgataacatagaagacctgaggattatagaacctatcagcaac

SEQ ID NO: 5500 - DNA, 282 bp, Homo Sapiens
gagaagactggcgtgtgccccgagctccaggctgaccagaactgcacgcaagagtgcgtctcggacagcgaatgcgccgacaacctcaagtgctgcagcgcgggctgtgccaccttctgctctctgcccaatgataaggagggttcctgcccccaggtgaacattaactttccccagctcggcctctgtcgggaccagtgccaggtggacagccagtgtcctggccagatgaaatgctgccgcaatggctgtgggaaggtgtcctgtgtcactcccaatttc

SEQ ID NO: 5501 - DNA, 1944 bp, Homo Sapiens
atcccgacaaatgcaagattattatctgatcattccaaaccaactgctgaaacggtagcatccgacaacactgcaatccccagtttaagggctgaagctgaagaaaatgaaaaagaaacagcagtatccacagaagacgattcccaccataaggctgaaaaatcatcagtactaaagtcaaaagaggaaagccatgaacagtcagcagaacagggcaagagttctagccaagagctgggattgaaggatcaagaggacagtgatggtcacttaagtgtgaatttggagtatgcaccaactgaaggtacatcggacataaaagaagatatgagtgagcctcaggagaaaaaactctcagagaacactgattttttggctcctggtgttagttccttcacagattctaaccaacaagaaagtatcacaaagagagaggaaaaccaagaacaacctagaaattattcacatcatcagttgaacaggagcagtaaacatagccaaggcctaagggatcaaggaaaccaagagcaggatccaaatatttccaatggagaagaggaagaagaaaaagagccaggtgaagttggtacccacaatgataaccaagaaagaaagacagaattgcccagggagcatgctaacagcaagcaggaggaagacaatacccaatctgatgatattttggaagagtctgatcaaccaactcaagtaagcaagatgcaggaggatgaatttgatcagggtaaccaagaacaagaagataactccaatgcagaaatggaagaggaaaatgcatcgaacgtcaataagcacattcaagaaactgaatggcagagtcaagagggtaaaactggcctagaagctatcagcaaccacaaagagacagaagaaaagactgtttctgaggctctgctcatggaacctactgatgatggtaataccacgcccagaaatcatggagttgatgatgatggcgatgatgatggcgatgatggcggcactgatggccccaggcacagtgcaagtgatgactacttcatcccaagccaggcctttctggaggccgagagagctcaatccattgcctatcacctcaaaattgaggagcaaagagaaaaagtacatgaaaatgaaaatataggtaccactgagcctggagagcaccaagaggccaagaaagcagagaactcatcaaatgaggaggaaacgtcaagtgaaggcaacatgagggtgcatgctgtggattcttgcatgagcttccagtgtaaaagaggccacatctgtaaggcagaccaacagggaaaacctcactgtgtctgccaggatccagtgacttgtcctccaacaaaaccccttgatcaagtttgtggcactgacaatcagacctatgctagttcctgtcatctattcgctactaaatgcagactggaggggaccaaaaaggggcatcaactccagctggattattttggagcctgcaaatctattcctacttgtacggactttgaagtgattcagtttcctctacggatgagagactggctcaagaatatcctcatgcagctttatgaagccaactctgaacacgctggttatctaaatgaggagcagagaaataaagtcaagaaaatttacctggatgaaaagaggcttttggctggggaccatcccattgaccttctcttaagggactttaagaaaaactaccacatgtatgtgtatcctgtgcactggcagtttagtgaacttgaccaacaccctatggatagagtcttgacacattctgaacttgctcctctgcgagcatctctggtgcccatggaacactgcataacccgtttctttgaggagtgtgaccccaacaaggataagcacatcaccctgaaggagtggggccactgctttggaattaaagaagaggacatagatgaaaatctcttgttt

SEQ ID NO: 5502 - DNA, 603 bp, Homo Sapiens
gccgaaggctcgcccgggacgcccgacgagtctaccccacctccccggaagaagaagaaggatattcgcgattacaatgatgcagacatggcgcgtcttctggagcaatgggagaaagatgatgacattgaagaaggagatcttccagagcacaagagaccttcagcacctgtcgacttctcaaagatagacccaagcaagcctgaaagcatattgaaaatgacgaaaaaagggaagactctcatgatgtttgtcactgtatcaggaagccctactgagaaggagacagaggaaattacgagcctctggcagggcagccttttcaatgccaactatgacgtccagaggttcattgtgggatcagaccgtgctatcttcatgcttcgcgatgggagctacgcctgggagatcaaggactttttggtcggtcaagacaggtgtgctgatgtaactctggagggccaggtgtaccccggcaaaggaggaggaagcaaagagaaaaataaaacaaagcaagacaagggcaaaaaaaagaaggaaggagatctgaaatctcggtcttccaaggaagaaaatcgagctgggaataaaagagaagacctg

SEQ ID NO: 5503 - DNA, 150 bp, Homo Sapiens
gcccaccactattcgcagctcacacagtttacctgtgagaccacactcgactcttgccagtgcaaactgccctcctcggagccgctcagcaggacctttgtttaccgggatgtgacggactgtaccagcgtcactggcactttcaaactg

SEQ ID NO: 5504 - DNA, 1662 bp, Homo Sapiens
ttaggggaccataactttctaaggagagagattaaaatagaaggtgaccttgttttagggggcctgtttcctattaacgaaaaaggcactggaactgaagaatgtgggcgaatcaatgaagaccgagggattcaacgcctggaagccatgttgtttgctattgatgaaatcaacaaagatgattacttgctaccaggagtgaagttgggtgttcacattttggatacatgttcaagggatacctatgcattggagcaatcactggagtttgtcagggcatctttgacaaaagtggatgaagctgagtatatgtgtcctgatggatcctatgccattcaagaaaacatcccacttctcattgcaggggtcattggtggctcttatagcagtgtttccatacaggtggcaaacctgctgcggctcttccagatccctcagatcagctacgcatccaccagcgccaaactcagtgataagtcgcgctatgattactttgccaggaccgtgccccccgacttctaccaggccaaagccatggctgagatcttgcgcttcttcaactggacctacgtgtccacagtagcctccgagggtgattacggggagacagggatcgaggccttcgagcaggaagcccgcctgcgcaacatctgcatcgctacggcggagaaggtgggccgctccaacatccgcaagtcctacgacagcgtgatccgagaactgttgcagaagcccaacgcgcgcgtcgtggtcctcttcatgcgcagcgacgactcgcgggagctcattgcagccgccagccgcgccaatgcctccttcacctgggtggccagcgacggctggggcgcgcaggagagcatcatcaagggcagcgagcatgtggcctacggcgccatcaccctggagctggcctcccagcctgtccgccagttcgaccgctacttccagagcctcaacccctacaacaaccaccgcaacccctggttccgggacttctgggagcaaaagtttcagtgcagcctccagaacaaacgcaaccacaggcgcgtctgcgacaagcacctggccatcgacagcagcaactacgagcaagagtccaagatcatgtttgtggtgaacgcggtgtatgccatggcccacgctttgcacaaaatgcagcgcaccctctgtcccaacactaccaagctttgtgatgctatgaagatcctggatgggaagaagttgtacaaggattacttgctgaaaatcaacttcacggctccattcaacacaaataaagatgcagatagcatagtcaagtttgacacttttggagatggaatggggcgatacaacgtgttcaatttccaaaatgtaggtggaaagtattcctacttgaaagttggtcactgggcagaaaccttatcgctagatgtcaactctatccactggtcccggaactcagtccccacttcccagtgcagcgacgcctgtgcccccaatgaaatgaagaatatgcaaccaggggatgtctgctgctggatttgcatcccctgtgaaccctacgaatacctggctgatgagtttacctgtatggattgtgggtctggacagtggcccactgcagacctaactggatgctatgaccttcctgaggactacatcaggtgggaagacgcctgg

SEQ ID NO: 5505 - DNA, 3357 bp, Homo Sapiens
gtgaccgttagggacaagacagaagagtcatgccctatcctgagaatagagggacatcagctgacatatgacaacataaacaaacttgaagtttcaggttttgatctaggagacagcttttctctaagacgtgcattttgtgaaagtgataaaacctgtttcaaattgggaagtgcacttcttattagagacactattaagatatttcccaaaggccttcctgaggagtactcagtagctgccatgtttcgagtacgaagaaacgccaaaaaggaacggtggtttctgtggcaggttttaaaccagcagaatattccacagatttctatagtagttgatggtggaaagaaggtggtggaatttatgtttcaagccacagagggagatgtgttgaactacatttttagaaatcgagaactccgtcctttgtttgatcgtcagtggcacaaacttggcattagtatacaatcccaggtcatttcactttatatggattgtaatttaattgcgaggaggcagactgatgaaaaggacactgtggatttccatggacggacagttattgctacgcgagcttcagatggcaagcctgtggatattgaacttcaccaacttaaaatctactgcagtgcaaacctcatagctcaagaaacatgttgtgaaatatcagatactaagtgcccagagcaggatggctttggaaatattgcatcatcatgggtaactgctcatgccagtaaaatgtcttcatatctgccagcaaagcaggaacttaaagaccagtgccagtgcattccaaacaagggagaagcaggattaccaggagctccgggttcacctgggcagaaagggcataaaggagagccgggtgaaaatggtttacatggtgctccaggattccctggtcaaaagggagagcaaggttttgaaggcagcaaaggagaaactggtgaaaagggtgaacaaggagaaaaaggagatccagctctggctggccttaatggagaaaatggtttgaaaggtgacttgggtcctcatggtccacctggcccaaaaggagaaaagggagatacaggacccccaggaccaccagccttacctggttccctggggatacaaggcccccaaggtccacctggaaaagagggtcagaggggaagacgagggaaaacaggacctcccggaaaaccaggacccccaggaccacctggacctcctggaatacaaggaatacaccaaactcttggtggatattataacaaggataacaagggaaatgatgaacatgaagctggaggcctgaaaggagacaagggtgaaactggactaccaggatttccagggtctgttggccctaaaggacaaaaaggagaacctggagagccttttacaaaaggagaaaaaggagatagaggagaacctggggtaataggatcacagggagtaaagggtgaacctggagatcccggaccccctggtttaataggaagcccaggactaaagggtcagcaaggatctgcaggctccatgggacccagaggaccgccaggagatgttggattgccaggagaacatggtatcccaggaaaacaaggcattaaaggagaaaagggagatccgggtgggatcataggccctcccgggcttccaggtccaaaaggtgaggctggtcctccagggaaaagcctgccaggggaaccaggattagatggaaatcctggagcacctggtccacgtgggccaaagggtgaaagaggacttccaggtgttcacggttccccaggggacataggcccacaagggataggaattcctggcagaacaggcgcccaaggaccagctggagagccaggtattcagggtcctcgaggtctccctgggttgccaggaactccagggactccagggaatgatggagttccagggagagatggaaagccaggcctgccaggccccccaggtgacccgattgcacttcctctcttgggagacatcggtgctttgctcaagaatttctgtggcaactgccaagccagtgtcccagggctgaaaagcaacaaaggagaagaaggaggtgctggtgagcctggaaagtatgattccatggcccggaagggtgatatagggccacggggtcctccaggaatcccaggaagagagggaccaaagggaagcaaaggagagcggggctaccctgggatacctggggagaaaggcgatgagggtcttcaaggaattccaggcattccaggtgctccaggcccgactggaccccctggcttaatgggaagaactggacatcctggtcccacaggagcaaaaggtgaaaagggcagcgacggaccccctgggaaacccggaccacctggaccacctggtattccatttaatgaacgaaacggcatgagcagtttatataaaattaagggaggtgtgaatgttcccagttacccagggccacccggtcctcctggcccaaaaggcgatcctggcccagtgggagagcctggtgcaatggggttgccaggattagaaggatttccaggtgtaaagggagatcgaggcccagcaggtcccccaggaatagcagggatgtcgggaaaacctggtgccccagggcctccaggagttccaggggaaccgggtgagagaggacctgttggagatataggtttccctggaccagaaggaccctcaggaaagccaggaataaatggaaaagatggaataccaggtgctcagggcatcatgggtaagcctggagacagaggccccaaaggagaacgtggtgatcaggggattccaggagacagaggctcacaaggtgaacggggaaaaccaggccttacaggcatgaagggggccatcggtcctatgggtccaccaggaaacaagggctccatgggatcccctggccaccaaggccctccaggctctccaggcatccctggcattccggctgatgcagtttcatttgaagaaataaagaagtatattaatcaagaggtcctaaggatttttgaagagaggatggctgtattcctatcccagctcaagctgccagcagcaatgttggctgcccaagcttatgggagacctgggccaccagggaaggatgggttgcctgggccaccaggagaccctggaccccaaggctacagaggacagaagggagaaagaggtgaacctggaattgggctgccagggagtccaggtcttcctgggacttcagctctgggtttgccaggctcaccaggtgccccaggcccacagggccccccaggacccagtggaagatgtaacccagaagattgcctctatcctgtgtctcatgcccatcagcgcacaggtgggaat

SEQ ID NO: 5506 - DNA, 2655 bp, Homo Sapiens
cgagggatccttgagagcatccagaggttttccttgctgcccacctacctccccgtgacctaccacatcaacaacgcggacgtctccttcttcctgaaggaggccaaccaggatatcatgaggaactccagcctgcagtcccgggtggagtcatttctgatttacaaatccaggaggctgcctgtcctcaatgccagctacgggcctttctccatcgagcaagtggtgccccaggatttaatgctaccttccaacccatttggattcaccaacaaattttctcttaactggaaactaaaagcccacatcctgcgggacaaagtctacctgagccggcccaaagtgcaggttctgttccacatcatgggcagagactgggacgaccgcagcgccggggagaagctgccgtgcctgagggtctttgctttccgagagacccgagaggtgcggggcagctgccggctgcagggggacctggggctgtgcgtggccgagctggagctcctgtccagctggttcagcccccccacggtggttgccgggaggaggaagtccgtggaccagccggaggggacccccgtggagctctactacaccgtgcacccagggggtgagagaggggactgcgtcagggaagacgcgaggagaagcaatgggatccggacaggccacagtgacatcgatgagtccgggccccccttgcagaggatcgggagcatcttcctttatcagacacacaggaaaccctccctgagagaactgcgtctggacaacagcgtggccatccactatataccaaagaccgtgaggaaaggagacgtgctgacttttcctgtttccatctccagaaattccactgaagatcgcttcacgttgagggcaaaggtgaagaaaggcgtgaacatcatcggcgtgcgagccagcagcccttccatttgggatgtcaaggagcgcacggattatactggaaagtatgcaccagctgtcatcgtttgtcagaagaaagcagctggctcagaaaacagtgcggatggcgcctcctacgaggtcatgcagatcgatgtggaggtggaagagcctggtgacctgccagccacacagctggtcacgtggcaggtcgagtaccccggagagatcacgtctgacttgggagtgtccaagatctatgtgagcccaaaggacttgattggagttgtgccgctggctatggaggcagaaatcctgaacacagccatcctcacggggaagacggtggccgtcccggtgaaagtggtctccgtggaggacgacggcacagtgacagagctgctggagtctgtggagtgtagatcgtctgatgaagacgtgattaaggtttctgacagatgtgactacgtctttgtcaatgggaaagaaatgaaaggcaaggtcaacgtggtggtgaacttcacctaccagcacctgagcagccccctggagatgacggtgtgggtgccccggcttccgctgcagatcgaggtctccgacaccgagctcaatcagatcaagggttggagagtgcccatcgtctccagcaggaggcctgccggggacagtgaagaggaggaggatgatgagcggaggggccgcggctgcaccctgcagtaccagcacgccatggtgcgggtcctgacgcagtttgtggctgaggcggccggccctgggggacacctggcccacctgctgggctcagactggcaagtggacatcacggagctgataaatgacttcatgcaggtggaggagcccaggatcgccaagctgcaaggcggacagatcctgatggggcaggagcttgggatgaccaccattcagatcctgtctcctctgtcagacaccatcctcgctgaaaagaccatcactgtgctggacgagaaggtgaccatcacagacctcggggtgcagctggtgacagggctgtcactctccttgcagctcagcccaggaagcaacagggccatctttgccactgcagtggctcaggaacttctgcagaggccaaaacaggaagcagccatcagttgctgggtccagttcagtgatggctcagtcacgcccttggatatttacgatgggaaagacttctccttgatggccacatctttggatgagaaggtagtctccatccaccaagaccccaaattcaagtggcctatcattgctgcggaaacagaaggacaaggcaccctggtcaaggtggaaatggttattagtgaatcctgccagaaatccaagcggaagagtgtgttagctgttggaacggcaaacatcaaagttaaatttggccaaaacgatgctaaccccaacaccagtgacagcagacacacaggggcaggggttcacatggaaaacaatgtcagtgacagaaggcccaaaaaacccttgcaggaatgggggagtcaggaaggacagtactatggcagttcttctatgggactcatggagggacggggcaccacgacagacaggtccatcctgcagaagaagaaaggccaggaaagccttttagatgacaacagccacttgcagaccatccccagcgacctcaccagcttcccagcccaggtggacctccccagaagcaatggggaaatggatgggaatgaccttatgcaggcatccaaagggctgagcgac

SEQ ID NO: 5507 - DNA, 381 bp, Homo Sapiens
tcatccccgggtgcaccagctatcagcgctgcctccttcctgcaggatctaatacatcggtatggcgagggtgacagcctcactctgcagcagctgaaggccctgctcaaccacctggatgtgggagtgggccggggtaatgtcacccagcacgtgcaaggacacaggaacctctccacgtgctttagttctggagacctcttcactgcccacaatttcagcgagcagtcgcggattgggagcagcgagctccaggagttctgccccaccatcctccagcagctggattcccgggcctgcacctcggagaaccaggaaaacgaggagaatgagcagacggaggaggggcggccaagcgctgttgaagtgtggggatacggt

SEQ ID NO: 5508 - DNA, 1788 bp, Homo Sapiens
gcggccgtgcaggcggccgaggtgaaagtggatggcagcgagccgaaactgagcaagaatgagctgaagagacgcctgaaagctgagaagaaagtagcagagaaggaggccaaacagaaggagctcagtgagaaacagctaagccaagccactgctgctgccaccaaccacaccactgataatggtgtgggtcctgaggaagagagcgtggacccaaatcaatactacaaaatccgcagtcaagcaattcatcagctgaaggtcaatggggaagacccatacccacacaagttccatgtagacatctcactcactgacttcatccaaaaatatagtcacctgcagcctggggatcacctgactgacatcaccttaaaggtggcaggtaggatccatgccaaaagagcttctgggggaaagctcatcttctatgatcttcgaggagagggggtgaagttgcaagtcatggccaattccagaaattataaatcagaagaagaatttattcatattaataacaaactgcgtcggggagacataattggagttcaggggaatcctggtaaaaccaagaagggtgagctgagcatcattccgtatgagatcacactgctgtctccctgtttgcatatgttacctcatcttcactttggcctcaaagacaaggaaacaaggtatcgccagagatacttggacttgatcctgaatgactttgtgaggcagaaatttatcatccgctctaagatcatcacatatataagaagtttcttagatgagctgggattcctagagattgaaactcccatgatgaacatcatcccagggggagccgtggccaagcctttcatcacttatcacaacgagctggacatgaacttatatatgagaattgctccagaactctatcataagatgcttgtggttggtggcatcgaccgggtttatgaaattggacgccagttccggaatgaggggattgatttgacgcacaatcctgagttcaccacctgtgagttctacatggcctatgcagactatcacgatctcatggaaatcacggagaagatggtttcagggatggtgaagcatattacaggcagttacaaggtcacctaccacccagatggcccagagggccaagcctacgatgttgacttcaccccacccttccggcgaatcaacatggtagaagagcttgagaaagccctggggatgaagctgccagaaacgaacctctttgaaactgaagaaactcgcaaaattcttgatgatatctgtgtggcaaaagctgttgaatgccctccacctcggaccacagccaggctccttgacaagcttgttggggagttcctggaagtgacttgcatcaatcctacattcatctgtgatcacccacagataatgagccctttggctaaatggcaccgctctaaagagggtctgactgagcgctttgagctgtttgtcatgaagaaagagatatgcaatgcgtatactgagctgaatgatcccatgcggcagcggcagctttttgaagaacaggccaaggccaaggctgcaggtgatgatgaggccatgttcatagatgaaaacttctgtactgccctggaatatgggctgccccccacagctggctggggcatgggcattgatcgagtcgccatgtttctcacggactccaacaacatcaaggaagtacttctgtttcctgccatgaaacccgaagacaagaaggagaatgtagcaaccactgatacactggaaagcacaacagttggcacttctgtc

SEQ ID NO: 5509 - DNA, 2274 bp, Homo Sapiens
aacaatcattatgacaagatcttggctcatagtcgtatcaggggtcgggaccaaggcccaaatgtctgtgcccttcaacagattttgggcaccaaaaagaaatacttcagcacttgtaagaactggtataaaaagtccatctgtggacagaaaacgactgtgttatatgaatgttgccctggttatatgagaatggaaggaatgaaaggctgcccagcagttttgcccattgaccatgtttatggcactctgggcatcgtgggagccaccacaacgcagcgctattctgacgcctcaaaactgagggaggagatcgagggaaagggatccttcacttactttgcaccgagtaatgaggcttgggacaacttggattctgatatccgtagaggtttggagagcaacgtgaatgttgaattactgaatgctttacatagtcacatgattaataagagaatgttgaccaaggacttaaaaaatggcatgattattccttcaatgtataacaatttggggcttttcattaaccattatcctaatggggttgtcactgttaattgtgctcgaatcatccatgggaaccagattgcaacaaatggtgttgtccatgtcattgaccgtgtgcttacacaaattggtacctcaattcaagacttcattgaagcagaagatgacctttcatcttttagagcagctgccatcacatcggacatattggaggcccttggaagagacggtcacttcacactctttgctcccaccaatgaggcttttgagaaacttccacgaggtgtcctagaaaggatcatgggagacaaagtggcttccgaagctcttatgaagtaccacatcttaaatactctccagtgttctgagtctattatgggaggagcagtctttgagacgctggaaggaaatacaattgagataggatgtgacggtgacagtataacagtaaatggaatcaaaatggtgaacaaaaaggatattgtgacaaataatggtgtgatccatttgattgatcaggtcctaattcctgattctgccaaacaagttattgagctggctggaaaacagcaaaccaccttcacggatcttgtggcccaattaggcttggcatctgctctgaggccagatggagaatacactttgctggcacctgtgaataatgcattttctgatgatactctcagcatggatcagcgcctccttaaattaattctgcagaatcacatattgaaagtaaaagttggccttaatgagctttacaacgggcaaatactggaaaccatcggaggcaaacagctcagagtcttcgtatatcgtacagctgtctgcattgaaaattcatgcatggagaaagggagtaagcaagggagaaacggtgcgattcacatattccgcgagatcatcaagccagcagagaaatccctccatgaaaagttaaaacaagataagcgctttagcaccttcctcagcctacttgaagctgcagacttgaaagagctcctgacacaacctggagactggacattatttgtgccaaccaatgatgcttttaagggaatgactagtgaagaaaaagaaattctgatacgggacaaaaatgctcttcaaaacatcattctttatcacctgacaccaggagttttcattggaaaaggatttgaacctggtgttactaacattttaaagaccacacaaggaagcaaaatctttctgaaagaagtaaatgatacacttctggtgaatgaattgaaatcaaaagaatctgacatcatgacaacaaatggtgtaattcatgttgtagataaactcctctatccagcagacacacctgttggaaatgatcaactgctggaaatacttaataaattaatcaaatacatccaaattaagtttgttcgtggtagcaccttcaaagaaatccccgtgactgtctataagccaattattaaaaaatacaccaaaatcattgatggagtgcctgtggaaataactgaaaaagagacacgagaagaacgaatcattacaggtcctgaaataaaatacactaggatttctactggaggtggagaaacagaagaaactctgaagaaattgttacaagaagaggtcaccaaggtcaccaaattcattgaaggtggtgatggtcatttatttgaagatgaagaaattaaaagactgcttcagggagacacacccgtgaggaagttgcaagccaacaaaaaagttcaaggatctagaagacgattaagggaaggtcgttctcag

SEQ ID NO: 5510 - DNA, 1272 bp, Homo Sapiens
cagacccccaactacaccagacccgtgttcctgtgcggaggggatgtgaagggggaatcaggttacgtggcaagtgaggggttccccaacctctacccccctaataaggagtgcatctggaccataacggtccccgagggccagactgtgtccctctcattccgagtcttcgacctggagctgcaccccgcctgccgctacgatgctctggaggtcttcgctgggtctgggacttccggccagcggctcggacgcttttgtgggaccttccggcctgcgcccctagtcgcccccggcaaccaggtgaccctgaggatgacgacggatgagggcacaggaggacgaggcttcctgctctggtacagcgggcgggccacctcgggcactgagcaccaattttgcggggggcggctggagaaggcccagggaaccctgaccacgcccaactggcccgagtccgattaccccccgggcatcagctgttcctggcacatcatcgcgcccccggaccaggtcatcgcgctgaccttcgagaagtttgacctggagccggacacctactgccgctatgactcggtcagcgtgttcaacggagccgtgagcgacgactcccggaggctggggaagttctgcggcgacgcagtcccgggctccatctcctccgaagggaatgaactcctcgtccagttcgtctcagatctcagtgtcaccgctgatggcttctcagcctcctacaagaccctgccgcggggcactgccaaagaagggcaagggcccggccccaaacggggaactgagcctaaagtcaagctgccccccaagtcccaacctccggagaaaacagaggaatctccttcagcccctgatgcacccacctgcccaaagcagtgccgccggacaggcaccttgcagagcaacttctgtgccagcagccttgtggtgactgcgacagtgaagtccatggttcgggagccaggggagggccttgccgtgactgtcagtcttattggtgcttataaaactggaggactggacctgccttctccacccactggtgcctccctgaagttttacgtgccttgcaagcagtgcccccccatgaagaaaggagtcagttatctgctgatgggccaggtagaagagaacagaggccccgtccttcctccagagagctttgtggttctccaccggcccaaccaggaccagatcctcaccaacctaagcaagaggaagtgcccctctcaacctgtgcgggctgctgcgtcccaggac

SEQ ID NO: 5511 - DNA, 1062 bp, Homo Sapiens
atggggcggctggtggctgtgggcttgctggggatcgcgctggcgctcctgggcgagaggcttctggcactcagaaatcgacttaaagcctccagagaagtagaatctgtagaccttccacactgccacctgattaaaggaattgaagctggctctgaagatattgacatacttcccaatggtctggctttttttagtgtgggtctaaaattcccaggactccacagctttgcaccagataagcctggaggaatactaatgatggatctaaaagaagaaaaaccaagggcacgggaattaagaatcagtcgtgggtttgatttggcctcattcaatccacatggcatcagcactttcatagacaacgatgacacagtttatctctttgttgtaaaccacccagaattcaagaatacagtggaaatttttaaatttgaagaagcagaaaattctctgttgcatctgaaaacagtcaaacatgagcttcttccaagtgtgaatgacatcacagctgttggaccggcacatttctatgccacaaatgaccactacttctctgatcctttcttaaagtatttagaaacatacttgaacttacactgggcaaatgttgtttactacagtccaaatgaagttaaagtggtagcagaaggatttgattcagcaaatgggatcaatatttcacctgatgataagtatatctatgttgctgacatattggctcatgaaattcatgttttggaaaaacacactaatatgaatttaactcagttgaaggtacttgagctggatacactggtggataatttatctattgatccttcctcgggggacatctgggtaggctgtcatcctaatggccagaagctcttcgtgtatgacccgaacaatcctccctcgtcagaggttctccgcatccagaacattctatctgagaagcctacagtgactacagtttatgccaacaatgggtctgttctccaaggaagttctgtagcctcagtgtatgatgggaagctgctcataggcactttataccacagagccttgtattgtgaactc

SEQ ID NO: 5512 - DNA, 1062 bp, Homo Sapiens
atggggaagctcgtggcgctggtcctgctgggggtcggcctgtccttagtcggggagatgttcctggcgtttagagaaagggtgaatgcctctcgagaagtggagccagtagaacctgaaaactgccaccttattgaggaacttgaaaatggctctgaagatattgatatacttcctagtgggctggcttttatctccagtggattaaaatatccaggcatgccaaactttgcgccagatgaaccaggaaaaatcttcttgatggatctgaatgaacaaaacccaagggcacaagcactagaaatcagtggtggatttgacaaagaattatttaatccacatgggatcagtattttcatcgacaaagacaatactgtgtatctttatgttgtgaatcatccccacatgaagtccactgtggagatatttaaatttgaggaacaacaacgttctctggtatacctgaaaactataaaacatgaacttctcaaaagtgtgaatgacattgtggttcttggaccagaacagttctatgccaccagagaccactattttaccaactccctcctgtcattttttgagatgatcttggatcttcgctggacttatgttcttttctacagcccaagggaggttaaagtggtggccaaaggattttgtagtgccaatgggatcacagtctcagcagaccagaagtatgtctatgtagctgatgtagcagctaagaacattcacataatggaaaaacatgataactgggatttaactcaactgaaggtgatacagttgggcaccttagtggataacctgactgtcgatcctgccacaggagacattttggcaggatgccatcctaatcctatgaagctactgaactataaccctgaggaccctccaggatcagaagtacttcgcatccagaatgttttgtctgagaagcccagggtgagcaccgtgtatgccaacaatggctctgtgcttcagggcacctctgtggcttctgtgtaccatgggaaaattctcataggcaccgtatttcacaaaactctgtactgtgagctc

SEQ ID NO: 5513 - DNA, 906 bp, Homo Sapiens
aagcccacggtgcgcaaagagcgcgtggtgcggcccgactcggagctgggcgagcggccccctgaggacaaccagagcttccagtacgaccacgaggccttcctgggcaaggaggactccaagaccttcgaccagctcaccccggacgagagcaaggagaggctagggaagattgttgatcgaatcgacaatgatggggatggctttgtcactactgaggagctgaaaacctggatcaaacgggtgcagaaaagatacatctttgataatgtcgccaaagtctggaaggattatgatagggacaaggatgataaaatttcctgggaagaatacaaacaagccacctatggttactacctaggaaaccccgcagagtttcatgattcttcagatcatcacacctttaaaaagatgctgccacgtgatgagagaagattcaaagctgcagacctcaatggtgacctgacagctactcgggaggagttcactgcctttctgcatcctgaagagtttgaacatatgaaggaaattgtggttttggaaaccctggaggacatcgacaagaacggggatgggtttgtggatcaggatgagtatattgcggatatgttttcccatgaggagaatggccctgagccagactgggttttatcagaacgggagcagtttaacgaattccgggatctgaacaaggacgggaagttagacaaagatgagattcgccactggatcctccctcaagattatgatcatgcacaggctgaggccaggcatctggtatatgaatcagacaaaaacaaggatgagaagctaactaaagaggaaatattggagaactggaacatgtttgtcggaagccaagctaccaattacggggaagatctcacaaaaaatcatgatgagctt

SEQ ID NO: 5514 - DNA, 1317 bp, Homo Sapiens
tgcggaccgggcagggggttcgggaagaggaggcaccccaaaaagctgacccctttagcctacaagcagtttatccccaatgtggccgagaagaccctaggcgccagcggaaggtatgaagggaagatctccagaaactccgagcgatttaaggaactcacccccaattacaaccccgacatcatatttaaggatgaagaaaacaccggagcggacaggctgatgactcagaggtgtaaggacaagttgaacgctttggccatctcggtgatgaaccagtggccaggagtgaaactgcgggtgaccgagggctgggacgaagatggccaccactcagaggagtctctgcactacgagggccgcgcagtggacatcaccacgtctgaccgcgaccgcagcaagtacggcatgctggcccgcctggcggtggaggccggcttcgactgggtgtactacgagtccaaggcacatatccactgctcggtgaaagcagagaactcggtggcggccaaatcgggaggctgcttcccgggctcggccacggtgcacctggagcagggcggcaccaagctggtgaaggacctgagccccggggaccgcgtgctggcggcggacgaccagggccggctgctctacagcgacttcctcactttcctggaccgcgacgacggcgccaagaaggtcttctacgtgatcgagacgcgggagccgcgcgagcgcctgctgctcaccgccgcgcacctgctctttgtggcgccgcacaacgactcggccaccggggagcccgaggcgtcctcgggctcggggccgccttccgggggcgcactggggcctcgggcgctgttcgccagccgcgtgcgcccgggccagcgcgtgtacgtggtggccgagcgtgacggggaccgccggctcctgcccgccgctgtgcacagcgtgaccctaagcgaggaggccgcgggcgcctacgcgccgctcacggcccagggcaccattctcatcaaccgggtgctggcctcgtgctacgcggtcatcgaggagcacagctgggcgcaccgggccttcgcgcccttccgcctggcgcacgcgctcctggctgcactggcgcccgcgcgcacggaccgcggcggggacagcggcggcggggaccgcgggggcggcggcggcagagtagccctaaccgctccaggtgctgccgacgctccgggtgcgggggccaccgcgggcatccactggtactcgcagctgctctaccaaataggcacctggctcctggacagcgaggccctgcacccgctgggcatggcggtcaagtccagc

SEQ ID NO: 5515 - DNA, 1488 bp, Homo Sapiens
aagagcattggcaccttctcagacccctgtaaggaccccacgcgtatcacctcccctaacgacccctgcctcactgggaagggtgactccagcggcttcagtagctacagtggctccagcagttctggcagctccatttccagtgccagaagctctggtggtggctccagtggtagctccagcggatccagcattgcccagggtggttctgcaggatcttttaagccaggaacggggtattcccaggtcagctactcctccggatctggctctagtctacaaggtgcatccggttcctcccagctggggagcagcagctctcactcgggaagcagcggctctcactcgggcagcagctctcattcgagcagcagcagcagctttcagttcagcagcagcagcttccaagtagggaatggctctgctctgccaaccaatgacaactcttaccgcggaatactaaacccttcccagcctggacaaagctcttcctcttcccagacctttggggtatccagcagtggccaaagcgtcagctccaaccagcgtccctgtagttcggacatccccgactctccctgcagtggagggcccatcgtctcgcactccggcccctacatccccagctcccactctgtgtcagggggtcagaggcctgtggtggtggtggtggaccagcacggttctggtgcccctggagtggttcaaggtcccccctgtagcaatggtggccttccaggcaagccctgtcccccaatcacctctgtagacaaatcctatggtggctacgaggtggtgggtggctcctctgacagttatctggttccaggcatgacctacagtaagggtaaaatctaccctgtgggctacttcaccaaagagaaccctgtgaaaggctctccaggggtcccttcctttgcagctgggccccccatctctgagggcaaatacttctccagcaaccccatcatccccagccagtcggcagcttcctcggccattgcattccagccagtggggactggtggggtccagctctgtggaggcggctccacgggctccaagggaccctgctctccctccagttctcgagtccccagcagttctagcatttccagcagctccggtttaccctaccatccctgcggcagtgcttcccagagcccctgctccccaccaggcaccggctccttcagcagcagctccagttcccaatccagtggcaaaatcatccttcagccttgcggcagcaagtccagctcttctggtcacccttgcatgtctgtctcctccttgacactgactgggggccccgatggctctccccatcctgatccctccgctggtgccaagccctgtggctccagcagtgctggaaagatcccctgccgctccatccgggatatcctagcccaagtgaagcctctggggccccagctagctgaccctgaagttttcctaccccaaggagagttactcgacagtcca

SEQ ID NO: 5516 - DNA, 357 bp, Homo Sapiens
gagccattagaaaaggtggcctctgtggggaattctagacccacaggccagcagctagaatccctgggcctcctggcccccggggagcagagcctgccgtgcaccgagaggaagccagctgctactgccaggctgagccgtcgggggacctcgctgtccccgccccccgagagctccgggagcccccagcagccgggcctgtccgccccccacagccgccagatccccgcaccccagggcgcggtgctggtgcagcgggagaaggacctgccgaactacaactggaactccttcggcctgcgcttcggcaagcgggaggcggcaccagggaaccacggcagaagcgctgggcggggc

SEQ ID NO: 5517 - DNA, 213 bp, Homo Sapiens
cagccgggcgccgcctccgccgccatcaacgcctccgtgggagccgcgggcagtgccgaaaatgcccccagcaaggaggtgctcgattcgttcctggatcttgcgagaaatatcttcccttccaacctggtgtcagcagcctttcgctcatactctaccacctatgaagagaggaatatcaccggaaccagggtgaaggtgcccgtggggcag

SEQ ID NO: 5518 - DNA, 1092 bp, Homo Sapiens
tacaaactggtttgctactttaccaactggtcccaggaccggcaggaaccaggaaaattcacccctgagaatattgaccccttcctatgctctcatctcatctattcattcgccagcatcgaaaacaacaaggttatcatcaaggacaagagtgaagtgatgctctaccagaccatcaacagtctcaaaaccaagaatcccaaactgaaaattctcttgtccattggagggtacctgtttggttccaaagggttccaccctatggtggattcttctacatcacgcttggaattcattaactccataatcctgtttctgaggaaccataactttgatggactggatgtaagctggatctacccagatcagaaagaaaacactcatttcactgtgctgattcatgagttagcagaagcctttcagaaggacttcacaaaatccaccaaggaaaggcttctcttgactgtgggcgtatctgcagggaggcaaatgattgataacagctatcaagttgagaaactggcaaaagatctggatttcatcaacctcctgtcctttgacttccatgggtcttgggaaaagccccttatcactggccacaacagccctctgagcaaggggtggcaggacagagggccaagctcctactacaatgtggaatatgctgtggggtactggatacataagggaatgccatcagagaaggtggtcatgggcatccccacatatgggcactccttcacactggcctctgcagaaaccaccgtgggggcccctgcctctggccctggagctgctggacccatcacagagtcttcaggcttcctggcctattatgagatctgccagttcctgaaaggagccaagatcacgcggctccaggatcagcaggttccctacgcagtcaaggggaaccagtgggtgggctatgatgatgtgaagagtatggagaccaaggttcagttcttaaagaatttaaacctgggaggagccatgatctggtctattgacatggatgacttcactggcaaatcctgcaaccagggcccttaccctcttgtccaagcagtcaagagaagccttggctccctg

SEQ ID NO: 5519 - DNA, 1230 bp, Homo Sapiens
caggatttcgggccgacgcgcttcatctgcacctcggtgcccgtggacgccgacatgtgcgccgcgtccgtggccgccggcggcgccgaggagctccggagcagcgtgctgcagctccgcgagacggtgctgcagcagaaggagaccatcctgagccagaaggagaccatccgcgagctgaccgccaagctgggccgctgcgagagccagagcacgctggaccccggagccggcgaggcccgggcgggcggcggccgcaagcagcccggctcgggcaagaacaccatgggcgacctgtcccggacaccggccgccgagacgctcagccaactcgggcaaactttgcaatcgctcaaaacccgcctggagaacctcgagcagtacagccgcctcaattcctccagccagaccaacagcctcaaggatctgctgcagagcaagatcgatgagctggagaggcaggtgctgtcccgggtgaacaccctggaggagggcaaggggggccccaggaacgacaccgaggagagggtcaagatcgagaccgccctgacctccctgcaccagcggatcagcgagctcgagaaaggtcagaaagacaaccgccctggagacaagttccagctcacattcccactgcggaccaactatatgtatgccaaggtgaagaagagcctgccagagatgtacgccttcactgtctgcatgtggctcaagtccagcgccacgccaggtgtgggcacgcccttctcctacgctgtgcccggccaggccaacgagctggtcctcattgagtggggcaacaaccccatggagatcctcatcaatgacaaggtggccaagctgccttttgtcatcaatgatggcaagtggcaccacatctgtgtcacctggaccacccgggacggggtctgggaggcctaccaggatggcacgcagggtggcagtggcgagaacttggcgccctatcaccccatcaagccccagggcgtgctggtgctgggccaggagcaggacactctgggtggtgggtttgatgccacccaggcatttgtgggtgagctggcccacttcaacatctgggaccgcaagctgacccccggggaggtgtacaacctggccacctgcagcaccaaggctctgtccggcaatgtcatcgcctgggctgaatcccacatcgagatctacggcggggccaccaagtggaccttcgaggcctgtcgccagatcaac

SEQ ID NO: 5520 - DNA, 642 bp, Homo Sapiens
aaaggctgtgtgggctgtgcaactgaggagaggctcttccacaaactgttttctcattacaaccagttcatcaggcctgtggaaaacgtttccgaccctgtcacggtacactttgaagtggccatcacccagctggccaacgtggatgaagtaaaccagatcatggaaaccaatttgtggctgcgtcacatctggaatgattataaattgcgctgggatccaatggaatatgatggcattgagactcttcgcgttcctgcagataagatttggaagcccgacattgttctctataacaatgctgttggtgacttccaagtagaaggcaaaacaaaagctcttcttaaatacaatggcatgataacctggactccaccagctatttttaagagttcctgccctatggatatcacctttttcccttttgatcatcaaaactgttccctaaaatttggttcctggacgtatgacaaagctgaaattgatcttctaatcattggatcaaaagtggatatgaatgatttttgggaaaacagtgaatgggaaatcattgatgcctctggctacaaacatgacatcaaatacaactgttgtgaagagatatacacagatataacctattctttctacattagaagattg

SEQ ID NO: 5521 - DNA, 363 bp, Homo Sapiens
cggccgcaggagcgcatggtcggagaactccgggacctgtcgcccgacgacccgcaggtgcagaaggcggcgcaggcggccgtggccagctacaacatgggcagcaacagcatctactacttccgagacacgcacatcatcaaggcgcagagccagctggtggccggcatcaagtacttcctgacgatggagatggggagcacagactgccgcaagaccagggtcactggagaccacgtcgacctcaccacttgccccctggcagcaggggcgcagcaggagaagctgcgctgtgactttgaggtccttgtggttccctggcagaactcctctcagctcctaaagcacaactgtgtgcagatg

SEQ ID NO: 5522 - DNA, 678 bp, Homo Sapiens
gaaaccacgactcaagggcccggagtcctgcttcccctgcccaagggggcctgcacaggttggatggcgggcatcccagggcatccgggccataatggggccccaggccgtgatggcagagatggcacccctggtgagaagggtgagaaaggagatccaggtcttattggtcctaagggagacatcggtgaaaccggagtacccggggctgaaggtccccgaggctttccgggaatccaaggcaggaaaggagaacctggagaaggtgcctatgtataccgctcagcattcagtgtgggattggagacttacgttactatccccaacatgcccattcgctttaccaagatcttctacaatcagcaaaaccactatgatggctccactggtaaattccactgcaacattcctgggctgtactactttgcctaccacatcacagtctatatgaaggatgtgaaggtcagcctcttcaagaaggacaaggctatgctcttcacctatgatcagtaccaggaaaataatgtggaccaggcctccggctctgtgctcctgcatctggaggtgggcgaccaagtctggctccaggtgtatggggaaggagagcgtaatggactctatgctgataatgacaatgactccaccttcacaggctttcttctctaccatgacaccaac

SEQ ID NO: 5523 - DNA, 168 bp, Homo Sapiens
gcccagtttgtgtccagcgtgcccaggtgtgatctggtggacttaggtgaaggcaagatttgcttctgttgtgaagaatttcaaccagccaagtgcacagacaaagaaaatgccttgaaactctttccggttcagccctgtagtgctgttcaccttctacttaagaaa

SEQ ID NO: 5524 - DNA, 1134 bp, Homo Sapiens
gagcagcaggtcccgctggtgctgtggtcgagtgaccgggacttgtgggctcctgcggccgacactcatgaaggccacatcaccagcgacttgcagctctctacctacttagatcccgccctggagctgggtcccaggaatgtgctgctgttcctgcaggacaagctgagcattgaggatttcacagcatatggcggtgtgtttggaaacaagcaggacagcgccttttctaacctagagaatgccctggacctggccccctcctcactggtgcttcctgccgtcgactggtatgcagtcagcactctgaccacttacctgcaggagaagctcggggccagccccttgcatgtggacctggccaccctgcgggagctgaagctcaatgccagcctccctgctctgctgctcattcgcctgccctacacagccagctctggtctgatggcacccagggaagtcctcacaggcaacgatgaggtcatcgggcaggtcctgagcacactcaagtccgaagatgtcccatacacagcggccctcacagcggtccgcccttccagggtggcccgtgatgtagccgtggtggccggagggctaggtcgccagctgctacaaaaacagccagtatcacctgtgatccatcctcctgtgagttacaatgacaccgctccccggatcctgttctgggcccaaaacttctctgtggcgtacaaggaccagtgggaggacctgactcccctcacctttggggtgcaggaactcaacctgactggctccttctggaatgactcctttgccaggctctcactgacctatgaacgactctttggtaccacagtgacattcaagttcattctggccaaccgcctctacccagtgtctgcccggcactggtttaccatggagcgcctcgaagtccacagcaatggctccgtcgcctacttcaatgcttcccaggtcacagggcccagcatctactccttccactgcgagtatgtcagcagcctgagcaagaagggtagtctcctcgtggcccgcacgcagccctctccctggcagatgatgcttcaggacttccagatccaggctttcaacgtaatgggggagcagttctcctacgccagcgactgtgcc

SEQ ID NO: 5525 - DNA, 246 bp, Homo Sapiens
ggctccatgatctcgaatatgaatgcctcacgggcagagttccaggccaagattgattccatcaagcagtacatgcagttccgcaaggtcaccaaggacttggagacgcgggttatccggtggtttgactacctgtgggccaacaagaagacggtggatgagaaggaggtgctcaagagcctcccagacaagctgaaggctgagatcgccatcaacgtgcacctggacacgctgaagaaggttcgc

SEQ ID NO: 5526 - DNA, 354 bp, Homo Sapiens
cagagcacagataatgatgtgaactatgaagactttactttcaccataccagatgtagaggactcaagtcagagaccagatcagggaccccagagacctcctcctgaaggactcctacctagaccccctggtgatagtggtaaccaagatgatggtcctcagcagagaccaccaaaaccaggaggccatcaccgccatcctcccccacctccttttcaaaatcagcaacgaccaccccaacgaggacaccgtcaactctctctaccccgatttccttctgtcagcctgcaggaagcatcatcattcttccggagggacagaccagcaagacatccccaggagcaaccactctgg

SEQ ID NO: 5527 - DNA, 669 bp, Homo Sapiens
aaactcgaagttgaaggcaacttctactcagaaaacgtcagtcggatcctggacaacttgcttgaaggctatgacaatcggctgcggccgggatttggaggtgctgtcactgaagtcaaaacagacatttatgtgaccagttttgggcccgtgtcagatgtggagatggagtatacgatggatgtttttttccgccagacctggactgatgagaggttgaagtttggggggccaactgagattctgagtctgaataatttgatggtcagtaaaatctggacgcctgacacctttttcagaaatggtaaaaagtccattgctcacaacatgacaactcctaataaactcttcagaataatgcagaatggaaccattttatacaccatgaggcttaccatcaatgctgactgtcccatgaggctggttaactttcctatggatgggcatgcttgtccactcaagtttgggagctatgcttatcccaaaagtgaaatcatatatacgtggaaaaaaggaccactttactcagtagaagtcccagaagaatcttcaagccttctccagtatgatctgattggacaaacagtatctagtgagacaattaaatctaacacaggtgaatacgttataatgacagtttacttccacttgcaaaggaagatgggctac

SEQ ID NO: 5528 - DNA, 1578 bp, Homo Sapiens
agcgtccacttcaacgaccccaagtacccgcagcaatggcacctgaataaccgacggagcccgggcagggacatcaacgtgacgggtgtgtgggaacgcaatgtgactgggcgaggggtgacggtggtggtagtggatgacggagtggaacacaccatccaggacattgcacccaactatagccctgagggtagctatgacctcaactctaatgaccctgaccccatgccccacccggatgtggagaatggcaaccaccatggcacgcgatgtgcaggagagatcgcggctgtgcccaacaacagcttctgtgccgtgggcgtggcctacgggagccgcatcgcaggtatccgggtactggatggacctctcacagacagcatggaggcagtggcgttcaacaagcactatcagatcaatgacatctacagctgcagctggggaccagatgacgatgggaagacagtggatggcccccatcagcttggaaaggctgccttacaacatggggtgattgctggtcgccagggctttgggagcatctttgtggtagccagtggcaacggaggccaacacaacgacaactgcaactacgatggctacgccaactccatctacaccgtcaccataggagctgtggatgaggagggacgcatgcctttctatgcagaagaatgtgcctccatgctggcagtcaccttcagtggtggggacaagatgcttcggagcattgtgaccactgactgggaccttcagaagggcactggctgcactgagggccacacagggacctcagctgcagcgcctctggcagctggcatgatagccttaatgctgcaggtgcggccctgcctcacgtggcgtgacgtccagcacatcattgtcttcacagccacccggtatgaggatcgccgtgcagagtgggtcaccaacgaggcaggcttcagccatagccaccagcacggtttcggcctcctcaacgcctggaggctcgtgaatgcagccaagatctggacatctgtcccttacttagcatcctacgtcagtcccgtgttaaaagaaaacaaggcgattccgcagtccccccgttccctggaggtcctgtggaatgtcagcaggatggacctggagatgtcagggctgaagaccctggagcatgtggcagtgacagtctccatcactcacccacggcgcggcagcttggagctgaagctgttctgccccagtggcatgatgtccctcatcggcgccccccgcagcatggactcggatcccaacggcttcaatgactggaccttctccactgtgcgatgctggggggagagagcccgagggacctacaggcttgtcatcagggatgtcggggatgagtcattccaggtcggcatcctccggcaatggcagctgaccctatatggctctgtgtggagtgcagtagacatcagggacagacaaaggctgttagagagtgccatgagtggaaaatacctgcacgatgacttcgccctgccctgcccaccggggctgaaaattcctgaggaagatggttacaccatcacccccaacaccctcaagacc

SEQ ID NO: 5529 - DNA, 144 bp, Homo Sapiens
gttcccatctatgagaagaagtatggccaagtccccatgtgtgacgccggtgagcagtgtgcagtgaggaaaggggcaaggatcgggaagctgtgtgactgtccccgaggaacctcctgcaattccttcctcctgaagtgctta

SEQ ID NO: 5530 - DNA, 189 bp, Homo Sapiens
atggggaactgtctgcacagggcggagctctccccctcaactgagaactcaagtcagctggacttcgaagatgtatggaattcttcctatggtgtgaatgattccttcccagatggagactatggtgccaacctggaagcagctgccccctgccactcctgtaacctgctggatgactctgcactgccc

SEQ ID NO: 5531 - DNA, 696 bp, Homo Sapiens
tgggccgtgattcgcattggaccaaatggctgtgatagtatggagtttcatgaaagtggcctgcttcgatttaagcaagtatctgacatgggagtgatccaccctctttataaaagcacagtaggaggaaggcgaaatgaaaatttggtcatcactggcaacaaccagcctattgtttttcagcaagggacaacaaagctcagtgtagaaaacaacaaaacttctattacaagtgacatcggcatgcagttttttgacccgaggactcaaaatatcttattcagcacagactatgaaactcatgagtttcatttgccaagtggagtgaaaagtttgaatgttcaaaaggcatctactgaaaggattaccagcaatgctaccagtgatttaaatataaaagttgatgggcgtgctattgtgcgtggaaatgaaggtgtattcattatgggcaaaaccattgaatttcacatgggtggtaatatggagttaaaggcggaaaacagtatcatcctaaatggatctgtgatggtcagcaccacccgcctacccagttcctccagtggagaccagttgggtagtggtgactgggtacgctacaagctctgcatgtgtgctgatgggacgctcttcaaggtgcaagtaaccagccagaacatgggctgccaaatctcagacaacccctgtggaaacactcat

SEQ ID NO: 5532 - DNA, 801 bp, Homo Sapiens
cagcagaccacgctacacccacttgtgggccgtgtctttgtgcacaccttggaccatgagacgtttctgagccttcctgagcatgtcgctgtcccacccgctgtccacatcacctaccacgcccacctccagggacacccagacctgccccggtggctccgctacacccagcgcagcccccaccaccctggcttcctctacggctctgccaccccagaagatcgtgggctccaggtcattgaggtcacagcctacaatcgggacagctttgataccactcggcagaggctggtgctggagattggggacccagaaggccccctgctgccataccaagccgagttcctggtgcgcagccacgatgcggaggaggtgctgccctcaacacctgccagccgcttcctctcagccttggggggactctgggagcccggagagcttcagctgctcaacgtcacctctgccttggaccgtgggggccgtgtcccccttcccattgagggccgaaaagaaggggtatacattaaggtgggttctgcctcacctttttctacttgcctgaagatggtggcatcccccgatagccacgcccgctgtgcccagggccagcctccacttctgtcttgctacgacaccttggcaccccacttccgcgttgactggtgcaatgtgaccctggtggataagtcagtgccggagcctgcagatgaggtgcccaccccaggtgatgggatcctggagcatgacccgttcttctgcccacccactgaggccccagaccgtgacttcttggtggatgct

SEQ ID NO: 5533 - DNA, 1563 bp, Homo Sapiens
gcctctgagggaggcttcacggctacaggacagaggcagctgaggccagagcactttcaagaagttggctacgcagctcccccctccccacccctatcccgaagcctccccatggatcaccctgactcctctcagcatggccctccctttgagggacagagtcaagtgcagccccctccctctcaggaggccacccctctccaacaggaaaagctgctacctgcccaactccctgctgaaaaggaagtgggtccccctctccctcaggaagctgtccccctccaaaaagagctgccctctctccagcaccccaatgaacagaaggaaggaatgccagctccatttggggaccagagccatccagaacctgagtcctggaatgcagcccagcactgccaacaggaccggtcccaagggggctggggccaccggctggatggcttcccccctgggcggccttctccagacaatctgaaccaaatctgccttcctaaccgtcagcatgtggtatatggtccctggaacctaccacagtccagctactcccacctcactcgccagggtgagaccctcaatttcctggagattggatattcccgctgctgccactgccgcagccacacaaaccgcctagagtgtgccaaacttgtgtgggaggaagcaatgagccgattctgtgaggccgagttctcggtcaagacccgaccccactggtgctgcacgcggcagggggaggctcggttctcctgcttccaggaggaagctccccagccacactaccagctccgggcctgccccagccatcagcctgatatttcctcgggtcttgagctgcctttccctcctggggtgcccacattggacaatatcaagaacatctgccacctgaggcgcttccgctctgtgccacgcaacctgccagctactgaccccctacaaagggagctgctggcactgatccagctggagagggagttccagcgctgctgccgccaggggaacaatcacacctgtacatggaaggcctgggaggatacccttgacaaatactgtgaccgggagtatgctgtgaagacccaccaccacttgtgttgccgccaccctcccagccctactcgggatgagtgctttgcccgtcgggctccttaccccaactatgaccgggacatcttgaccattgacatcagtcgagtcacccccaacctcatgggccacctctgtggaaaccaaagagttctcaccaagcataaacatattcctgggctgatccacaacatgactgcccgctgctgtgacctgccatttccagaacaggcctgctgtgcagaggaggagaaattaaccttcatcaatgatctgtgtggtccccgacgtaacatctggcgagaccctgccctctgctgttacctgagtcctggggatgaacaggtcaactgcttcaacatcaattatctgaggaacgtggctctagtgtctggagacactgagaacgccaagggccagggggagcagggctcaactggaggaacaaatatcagctccacctctgagcccaaggaagaa

SEQ ID NO: 5534 - DNA, 861 bp, Homo Sapiens
gcagaagctccctgcggtgtggccccccaagcacgcatcacaggtggcagcagtgcagtcgccggtcagtggccctggcaggtcagcatcacctatgaaggcgtccatgtgtgtggtggctctctcgtgtctgagcagtgggtgctgtcagctgctcactgcttccccagcgagcaccacaaggaagcctatgaggtcaagctgggggcccaccagctagactcctactccgaggacgccaaggtcagcaccctgaaggacatcatcccccaccccagctacctccaggagggctcccagggcgacattgcactcctccaactcagcagacccatcaccttctcccgctacatccggcccatctgcctccctgcagccaacgcctccttccccaacggcctccactgcactgtcactggctggggtcatgtggccccctcagtgagcctcctgacgcccaagccactgcagcaactcgaggtgcctctgatcagtcgtgagacgtgtaactgcctgtacaacatcgacgccaagcctgaggagccgcactttgtccaagaggacatggtgtgtgctggctatgtggaggggggcaaggacgcctgccagggtgactctgggggcccactctcctgccctgtggagggtctctggtacctgacgggcattgtgagctggggagatgcctgtggggcccgcaacaggcctggtgtgtacactctggcctccagctatgcctcctggatccaaagcaaggtgacagaactccagcctcgtgtggtgccccaaacccaggagtcccagcccgacagcaacctctgtggcagccacctggccttcagctctgccccagcccagggc

SEQ ID NO: 5535 - DNA, 396 bp, Homo Sapiens
cccccaaacaggcgaacctgtgtgttctttgaggcccctggagtgcggggaagcacaaagacactgggagagctgctagatacaggcacagagctccccagagctatccgctgcctctacagccgctgctgctttgggatctggaacctgacccaagaccgggcacaggtggaaatgcaaggatgccgagacagtgatgagccaggctgtgagtccctccactgtgacccaagtccccgagcccaccccagccctggctccactctcttcacctgctcctgtggcactgacttctgcaatgccaattacagccatctgcctcctccagggagccctgggactcctggctcccagggtccccaggctgccccaggtgagtccatctggatggcactg

SEQ ID NO: 5536 - DNA, 321 bp, Homo Sapiens
ggtcctatgcccaagctggctgaccggaagctgtgtgcggaccaggagtgcagccaccctatctccatggctgtggcccttcaggactacatggcccccgactgccgattcctgaccattcaccggggccaagtggtgtatgtcttctccaagctgaagggccgtgggcggctcttctggggaggcagcgttcagggagattactatggagatctggctgctcgcctgggctatttccccagtagcattgtccgagaggaccagaccctgaaacctggcaaagtcgatgtgaagacagacaaatgggatttctactgccag

SEQ ID NO: 5537 - DNA, 999 bp, Homo Sapiens
gtcagtccgagtgcctcagcctggccagaggagaagaattaccaccagccagccattttgaattcatcggctcttcggcaaattgcagaaggcaccagtatctctgaaatgtggcaaaatgacttacagccattgctgatagagcgatacccgggatcccctggaagctatgctgctcgtcagcacatcatgcagcgaattcagaggcttcaggctgactgggtcttggaaatagacaccttcttgagtcagacaccctatgggtaccggtctttctcaaatatcatcagcaccctcaatcccactgctaaacgacatttggtcctcgcctgccactatgactccaagtatttttcccactggaacaacagagtgtttgtaggagccactgattcagccgtgccatgtgcaatgatgttggaacttgctcgtgccttagacaagaaactcctttccttaaagactgtttcagactccaagccagatttgtcactccagctgatcttctttgatggtgaagaggcttttcttcactggtctcctcaagattctctctatgggtctcgacacttagctgcaaagatggcatcgaccccgcacccacctggagcgagaggcaccagccaactgcatggcatggatttattggtcttattggatttgattggagctccaaacccaacgtttcccaatttttttccaaactcagccaggtggttcgaaagacttcaagcaattgaacatgaacttcatgaattgggtttgctcaaggatcactctttggaggggcggtatttccagaattacagttatggaggtgtgattcaggatgaccatattccatttttaagaagaggtgttccagttctgcatctgataccgtctcctttccctgaagtctggcacaccatggatgacaatgaagaaaatttggatgaatcaaccattgacaatctaaacaaaatcctacaagtctttgtgttggaatatcttcatttg

SEQ ID NO: 5538 - DNA, 1131 bp, Homo Sapiens
cagaggttgccccggatgcaggaggattcccccttgggaggaggctcttctggggaagatgacccactgggcgaggaggatctgcccagtgaagaggattcacccagagaggaggatccacccggagaggaggatctacctggagaggaggatctacctggagaggaggatctacctgaagttaagcctaaatcagaagaagagggctccctgaagttagaggatctacctactgttgaggctcctggagatcctcaagaaccccagaataatgcccacagggacaaagaaggggatgaccagagtcattggcgctatggaggcgacccgccctggccccgggtgtccccagcctgcgcgggccgcttccagtccccggtggatatccgcccccagctcgccgccttctgcccggccctgcgccccctggaactcctgggcttccagctcccgccgctcccagaactgcgcctgcgcaacaatggccacagtgtgcaactgaccctgcctcctgggctagagatggctctgggtcccgggcgggagtaccgggctctgcagctgcatctgcactggggggctgcaggtcgtccgggctcggagcacactgtggaaggccaccgtttccctgccgagatccacgtggttcacctcagcaccgcctttgccagagttgacgaggccttggggcgcccgggaggcctggccgtgttggccgcctttctggaggagggcccggaagaaaacagtgcctatgagcagttgctgtctcgcttggaagaaatcgctgaggaaggctcagagactcaggtcccaggactggacatatctgcactcctgccctctgacttcagccgctacttccaatatgaggggtctctgactacaccgccctgtgcccagggtgtcatctggactgtgtttaaccagacagtgatgctgagtgctaagcagctccacaccctctctgacaccctgtggggacctggtgactctcggctacagctgaacttccgagcgacgcagcctttgaatgggcgagtgattgaggcctccttccctgctggagtggacagcagtcctcgggctgctgagccagtccagctgaattcctgcctggctgctggtgac

SEQ ID NO: 5539 - DNA, 1134 bp, Homo Sapiens
aaagctcaggttaatccagctatatgccgctatcctctgggcatgtcaggaggccagattccagatgaggacatcacagcttccagtcagtggtcagagtccacagctgccaaatatggaaggctggactcagaagaaggggatggagcctggtgccctgagattccagtggaacctgatgacctgaaggagtttctgcagattgacttgcacaccctccattttatcactctggtggggacccaggggcgccatgcaggaggtcatggcatcgagtttgcccccatgtacaagatcaattacagtcgggatggcactcgctggatctcttggcggaaccgtcatgggaaacaggtgctggatggaaatagtaacccctatgacattttcctaaaggacttggagccgcccattgtagccagatttgttcggttcattccagtcaccgaccactccatgaatgtgtgtatgagagtggagctttacggctgtgtctggctagatggcttggtgtcttacaatgctccagctgggcagcagtttgtactccctggaggttccatcatttatctgaatgattctgtctatgatggagctgttggatacagcatgacagaagggctaggccaattgaccgatggtgtgtctggcctggacgatttcacccagacccatgaataccacgtgtggcccggctatgactatgtgggctggcggaacgagagtgccaccaatggctacattgagatcatgtttgaatttgaccgcatcaggaatttcactaccatgaaggtccactgcaacaacatgtttgctaaaggtgtgaagatctttaaggaggtacagtgctacttccgctctgaagccagtgagtgggaacctaatgccatttccttcccccttgtcctggatgacgtcaaccccagtgctcggtttgtcacggtgcctctccaccaccgaatggccagtgccatcaagtgtcaataccattttgcagatacctggatgatgttcagtgagatcaccttccaatcagatgctgcaatgtacaacaactctgaagccctgcccacctctcctatggcacccacaacctatgatccaatgcttaaagttgatgacagcaacactcgg

SEQ ID NO: 5540 - DNA, 2211 bp, Homo Sapiens
ggcaggggtggagatgggggtgaacccagccagcttccccattgcccctctgtatctcccagtgcccagccttggacacaccctggccagagccagctgtttgcagacctgagccgagaggagctgacggctgtgatgcgctttctgacccagcggctggggccagggctggtggatgcagcccaggcccggccctcggacaactgtgtcttctcagtggagttgcagctgcctcccaaggctgcagccctggctcacttggacagggggagccccccacctgcccgggaggcactggccatcgtcttctttggcaggcaaccccagcccaacgtgagtgagctggtggtggggccactgcctcacccctcctacatgcgggacgtgactgtggagcgtcatggaggccccctgccctatcaccgacgccccgtgctgttccaagagtacctggacatagaccagatgatcttcaacagagagctgccccaggcttctgggcttctccaccactgttgcttctacaagcaccggggacggaacctggtgacaatgaccacggctccccgtggtctgcaatcaggggaccgggccacctggtttggcctctactacaacatctcgggcgctgggttcttcctgcaccacgtgggcttggagctgctagtgaaccacaaggcccttgaccctgcccgctggactatccagaaggtgttctatcaaggccgctactacgacagcctggcccagctggaggcccagtttgaggccggcctggtgaatgtggtgctgatcccagacaatggcacaggtgggtcctggtccctgaagtcccctgtgcccccgggtccagctccccctctacagttctatccccaaggcccccgcttcagtgtccagggaagtcgagtggcctcctcactgtggactttctcctttggcctcggagcattcagtggcccaaggatctttgacgttcgcttccaaggagaaagactagtttatgagataagcctccaagaggccttggccatctatggtggaaattccccagcagcaatgacgacccgctatgtggatggaggctttggcatgggcaagtacaccacgcccctgacccgtggggtggactgcccctacttggccacctacgtggactggcacttccttttggagtcccaggcccccaagacaatacgtgatgccttttgtgtgtttgaacagaaccagggcctccccctgcggcgacaccactcagatctctactcgcactactttgggggtcttgcggaaacggtgctggtcgtcagatctatgtccaccttgctcaactatgactatgtgtgggatacggtcttccaccccagtggggccatagaaatacgattctatgccacgggctacatcagctcggcattcctctttggtgctactgggaagtacgggaaccaagtgtcagagcacaccctgggcacggtccacacccacagcgcccacttcaaggtggatctggatgtagcaggactggagaactgggtctgggccgaggatatggtctttgtccccatggctgtgccctggagccctgagcaccagctgcagaggctgcaggtgacccggaagctgctggagatggaggagcaggccgccttcctcgtgggaagcgccacccctcgctacctgtacctggccagcaaccacagcaacaagtggggtcacccccggggctaccgcatccagatgctcagctttgctggagagccgctgccccaaaacagctccatggcgagaggcttcagctgggagaggtaccagctggctgtgacccagcggaaggaggaggagcccagtagcagcagcgttttcaatcagaatgacccttgggcccccactgtggatttcagtgacttcatcaacaatgagaccattgctggaaaggatttggtggcctgggtgacagctggttttctgcatatcccacatgcagaggacattcctaacacagtgactgtggggaacggcgtgggcttcttcctccgaccctataacttctttgacgaagacccctccttctactctgccgactccatctacttccgaggggaccaggatgctggggcctgcgaggtcaaccccctagcttgcctgccccaggctgctgcctgtgcccccgacctccctgccttctcccacgggggcttctctcacaac

SEQ ID NO: 5541 - DNA, 2331 bp, Homo Sapiens
accaaagatatctccattaacatataccattctgaaactaaagacatagacaatcccccaagaaatgaaacaactgaaagtactgaaaaaatgtacaaaatgtcaactatgagacgaatattcgatttggcaaagcatcgaacaaaaagatccgcatttttcccaacgggggttaaagtctgtccacaggaatccatgaaacagattttagacagtcttcaagcttattatagattgagagtgtgtcaggaagcagtatgggaagcatatcggatctttctggatcgcatccctgacacaggggaatatcaggactgggtcagcatctgccagcaggagaccttctgcctctttgacattggaaaaaacttcagcaattcccaggagcacctggatcttctccagcagagaataaaacagagaagtttccctgacagaaaagatgaaatatctgcagagaagacattgggagagcctggtgaaaccattgtcatttcaacagatgttgccaacgtctcacttgggcctttccctctcactcctgatgacaccctcctcaatgaaattctcgataatacactcaacgacaccaagatgcctacaacagaaagagaaacagaattcgctgtgttggaggagcagagggtggagctcagcgtctctctggtaaaccagaagttcaaggcagagctcgctgactcccagtccccatattaccaggagctagcaggaaagtcccaacttcagatgcaaaagatatttaagaaacttccaggattcaaaaaaatccatgtgttaggatttagaccaaagaaagaaaaagatggctcaagctccacagagatgcaacttacggccatctttaagagacacagtgcagaagcaaaaagccctgcaagtgacctcctgtcttttgattccaacaaaattgaaagtgaggaagtctatcatggaaccatggaggaggacaagcaaccagaaatctatctcacagctacagacctcaaaaggctgatcagcaaagcactagaggaagaacaatctttggatgtggggacaattcagttcactgatgaaattgctggatcactgccagcctttggtcctgacacccaatcagagctgcccacatcttttgctgttataacagaggatgctactttgagtccagaacttcctcctgttgaaccccagcttgagacagtggacggagcagagcatggtctacctgacacttcttggtctccacctgctatggcctctacctccctgtcagaagctccacctttctttatggcatcaagcatcttctctctgactgatcaaggcaccacagatacaatggccactgaccagacaatgctagtaccagggctcaccatccccaccagtgattattctgcaatcagccaactggctctgggaatttcacatccacctgcatcttcagatgacagccgatcaagtgcaggtggcgaagatatggtcagagacctagatgaaatggatctgtctgacactcctgccccatctgaggtaccagagctcagcgaatatgtttctgtcccagatcatttcttggaggataccactcctgtctcagctttacagtatatcaccactagttctatgaccattgcccccaagggccgagagctggtagtgttcttcagtctgcgtgttgctaacatggccttctccaacgacctgttcaacaagagctctctggagtaccgagctctggagcaacaattcacacagctgctggttccatatctacgatccaatcttacaggatttaagcaacttgaaatacttaacttcagaaacgggagtgtgattgtgaatagcaaaatgaagtttgctaagtcagtgccgtataacctcaccaaggctgtgcacggggtcttggaggattttcgttctgctgcagcccaacaactccatctggaaatagacagctactctctcaacattgaaccagctgatcaagcagatccctgcaagttcctggcctgcggcgaatttgcccaatgtgtaaagaacgaatggactgaggaagcggagtgtcgctgcaaaccaggatatgacagccaggggagcctggacggtctggaaccaggcctctgtggccctggcacaaaggaatgcgaggtcctccagggaaagggagctccatgcaggttgccagatcactctgaaaatcaagcatacaaaactagtgttaaaaagttccaaaatcaacaaaataacaaggtaatcagtaaaagaaattctgaattactgaccgtagaatatgaagaatttaaccatcaagattgggaaggaaat

SEQ ID NO: 5542 - DNA, 1350 bp, Homo Sapiens
aaagaagtttgctatgaaaggttagggtgtttcaaagatggtttaccatggaccaggactttctcaacagagttggtaggtttaccctggtctccagagaagataaacactcgtttcctgctctacactatacacaatcccaatgcctatcaggagatcagtgcggttaattcttcaactatccaagcctcatattttggaacagacaagatcacccgtatcaacatagctggatggaaaacagatggcaaatggcagagagacatgtgcaatgtgttgctacagctggaagatataaattgcattaatttagattggatcaacggttcacgggaatacatccatgctgtaaacaatctccgtgttgttggtgctgaggtggcttattttattgatgttctcatgaaaaaatttgaatattccccttctaaagtgcacttgattggccacagcttgggagcacacctggctggggaagctgggtcaaggataccaggccttggaagaataactgggttggacccagctgggccatttttccacaacactccaaaggaagtcaggctagacccctcggatgccaactttgttgacgttattcatacaaatgcagctcgcatcctctttgagcttggtgttggaaccattgatgcttgtggtcatcttgacttttacccaaatggagggaagcacatgccaggatgtgaagacttaattacacctttactgaaatttaacttcaatgcttacaaaaaagaaatggcttccttctttgactgtaaccatgcccgaagttatcaattttatgctgaaagcattcttaatcctgatgcatttattgcttatccttgtagatcctacacatcttttaaagcaggaaattgcttcttttgttccaaagaaggttgcccaacaatgggtcattttgctgatagatttcacttcaaaaatatgaagactaatggatcacattattttttaaacacagggtccctttccccatttgcccgttggaggcacaaattgtctgttaaactcagtggaagcgaagtcactcaaggaactgtctttcttcgtgtaggcggggcaattgggaaaactggggagtttgccattgtcagtggaaaacttgagccaggcatgacttacacaaaattaatcgatgcagatgttaacgttggaaacattacaagtgttcagttcatctggaaaaaacatttgtttgaagattctcagaataagttgggagcagaaatggtgataaatacatctgggaaatatggatataaatctaccttctgtagccaagacattatgggacctaatattctccagaacctgaaaccatgc

SEQ ID NO: 5543 - DNA, 300 bp, Homo Sapiens
cagcccacaatgacccagacctctagctctcagggaggccttggcggtctaagtctgaccacagagccagtttcttccaacccaggatacatcccttcctcagaggctaacaggccaagccatctgtccagcactggtaccccaggcgcaggtgtccccagcagtggaagagacggaggcacaagcagagacacatttcaaactgttccccccaattcaaccaccatgagcctgagcatgagggaagatgcgaccatcctgcccagccccacgtcagagactgtgctcactgtggctgca

SEQ ID NO: 5544 - DNA, 333 bp, Homo Sapiens
agttctgagtggtctgtgggccaggtcagcaccaacacatcatacaaggccttcagttctgagtggatcagcgctgatattgggctgcaggtcgggctgggtggagtcaacatcacactcacagggacccccgtgcagcagctgaatgagaccatcaattacaacgaggagttcacctggcgcctgggtgagaactatgctgaggagtatgcaaaggctctggagaaggggctgccagaccctgtgttgtacctagctgagaagttcactccaagaagcccatgtggcctataccgccagtaccgcctggcgggacactacacctcagccatg

SEQ ID NO: 5545 - DNA, 318 bp, Homo Sapiens
gtgggtacagtgaacaccaacacatcctacaaagccttcagcgcagcgcgcgttacagcccgtgtccgtctgctcgtgggcctggagggcattaatattacactcacagggaccccagtgcatcagctgaacgagaccattgactacaacgagcagttcacctggcgtctgaaagagaattacgccgcggagtacgcgaacgcactggagaaggggctgccggacccagtgctctacctggcggagaagttcacaccgagtagcccttgcggcctgtaccaccagtaccacctggcgggacactacgcctcggccacg

SEQ ID NO: 5546 - DNA, 213 bp, Homo Sapiens
ggaattttcaataaacgtgacttcactaggtggcctaagccccgatgtaaaatgtatatcccactggaccctgattacaatgcagactgccccaatgtgacagcacctgtttgtgcctcaaatggccacactttccagaatgagtgtttcttttgtgttgaacagagggaatttcattatcgtataaaatttgaaaaatatggaaaatgtgat

SEQ ID NO: 5547 - DNA, 597 bp, Homo Sapiens
cacggctgtctgcactgccacagcaacttctccaagaagttctccttctaccgccaccatgtgaacttcaagtcctggtgggtgggcgacatccccgtgtcaggggcgctgctcaccgactggagcgacgacacgatgaaggagctgcacctggccatccccgccaagatcacccgggagaagctggaccaagtggcgacagcagtgtaccagatgatggatcagctgtaccaggggaagatgtacttccccgggtatttccccaacgagctgcgaaacatcttccgggagcaggtgcacctcatccagaacgccatcatcgaaagccgcatcgactgtcagcaccgctgtggcatcttccagtacgagaccatctcctgcaacaactgcacagactcgcacgtcgcctgctttggctataactgcgagtcctcggcgcagtggaagtcagctgtccagggcctcctgaactacataaataactggcacaaacaggacacgagcatgagcctggtatcgccagccttaaggtgtctggagcccccacacttggccaacctgaccttggaagatgctgctgagtgtctcaagcagcac

SEQ ID NO: 5548 - DNA, 2451 bp, Homo Sapiens
tgtggccaggctcccctggaccctgtctacctgccggcagccctggagctcctagacgcccctgaacacttccgtgtgcagcaggtgggccactacccacctgccaactcctctctgagctcccgatctgagacctttctgctcctacagccctggcccagggcccagccacttctccgggcctcctacccaccttttgccactcagcaggtggtcccccctcgagtcactgagccccaccaacggccagtcccatgggacgtgcgggccgtttcagtggaagcggctgtgactccagcagagccctacgcccgggttctcttccacctcaaagggcaggattggccaccagggtctggcagcctgccctgtgcccggctccatgccacacaccctgccggcactgctcaccaagcctgccgcttccagccatccctgggcgcctgcgtggtggagctggagcttccctcgcactggttctcacaggcctccaccacacgggccgagctggcctacacgcttgagcctgcagctgagggccctgggggctgtggctccggcgaggagaacgaccctggggagcaggccctcccagtggggggtgtggagctgcgcccagcagaccccccgcagtaccaggaggtacctctggacgaggctgtgactctgcgggtgcctgacatgccagtgcggcccggccagctctttagtgctaccctcctgcttcggcacaacttcacagccagcctcctgaccctgcggatcaaggtgaagaaggggctgcatgtgacagccgcccgcccagcccagcccacactctggactgccaagctggaccgcttcaagggctccaggcaccacaccaccctcatcacctgccaccgtgctgggctcacagagccagattccagtccccttgaactgtctgagttcctatgggtggactttgtggtggagaatagcactggtgggggcgtagcggtcactcgccccgtcacgtggcagctggagtacccaggccaggcccctgaagcagagaaggacaaaatggtgtgggaaatcctggtgtctgagcgggacatcagagcccttatcccactggccaaggctgaggagctggtgaatacagcaccactgactggagtgccccagcatgtccccgtgcgccttgtcactgtggacggcgggggggccttggtggaggtgacagagcatgtcggctgcgagtctgccaacacacaggtcctgcaggtgtctgaggcctgtgatgccgtgttcgtggctggcaaggagagccggggcgcccggggggtgcgagtggacttctggtggcgccggctccgcgcctcgctgcggctgaccgtgtgggcccccctgctaccgctgcgtatcgagctcaccgacaccaccctcgagcaggtccgcggctggagggtacctggccctgctgaagggcctgcggaacccgctgcagaggcgtcggatgaggccgagcggcgcgcccgtggctgccacctgcagtaccagcgggccggtgtgcgcttcctcgcccccttcgcggcccacccgctggacggcggccgccgcctcacgcacctgcttggccccgactggctgctagacgtgtcccacctcgtggcgccacacgcccgcgtgctggactcgcgtgtagcctctctggagggtggccgtgtcgtggtgggccgggagcccggtgtcacctccattgaggtgcgttccccactgtctgactccatcctgggggagcaggcgctggctgtgacggacgacaaggtctcagtgctggagctgagggtgcagccagtgatgggcatctcgctgaccttgagccggggcactgcccaccccggggaggtcacagctacgtgctgggcacagtcagcccttcccgccccaaagcaggaggtggccctctccctatggctgtccttctctgatcacactgtggccccagctgagctctacgaccgccgtgacctgggactgtccgtctcagccgaggagcctggtgccatcctgccagctgaggagcagggtgcccagctcggggtggtggtgagtggggcaggcgccgaggggctgccgctgcatgtggctctgcacccgcccgagccctgccgccggggccgccaccgtgtgcctctggcctctggcaccgcctggctggggctgccccctgcctccactccagcccctgctctcccatccagccctgcttggagcccaccagccacagaagccaccatgggtggtaaacggcaggtggcaggcagtgtcgggggcaacacaggtgtgaggggcaagtttgagcgggcagaggaggaggccaggaaggaggagaccgaagccagggaggaggaggaggaagaggaggaggagatggtccctgcccctcagcatgtcactgagctagagctgggcatgtacgcc

SEQ ID NO: 5549 - DNA, 645 bp, Homo Sapiens
ctgaaccgaaggaagaagcaagtgggcactggcctggggggcaactgcacaggctgtatcatctgctcagaggagaacggctgttccacctgccagcagaggctcttcctgttcatccgccgggaaggcatccgccagtacggcaagtgcctgcacgactgtccccctgggtacttcggcatccgcggccaggaggtcaacaggtgcaaaaaatgtggggccacttgtgagagctgcttcagccaggacttctgcatccggtgcaagaggcagttttacttgtacaaggggaagtgtctgcccacctgcccgccgggcactttggcccaccagaacacacgggagtgccagggggagtgtgaactgggtccctggggcggctggagcccctgcacacacaatggaaagacctgcggctcggcttggggcctggagagccgggtacgagaggctggccgggctgggcatgaggaggcagccacctgccaggtgctttctgagtcaaggaaatgtcccatccagaggccctgcccaggagagaggagccccggccagaagaagggcaggaaggaccggcgcccacgcaaggacaggaagctggaccgcaggctggacgtgaggccgcgccagcccggcctgcagccc

SEQ ID NO: 5550 - DNA, 333 bp, Homo Sapiens
ttccaacctcctcaattaggcagaacaaacatgcattactccaaattgccccgcactgcgatagagacagagttcaagcagaatgttggcccaccacccaaggatctgaccactgaagtttacttcccttcaatcaaatcgagatcacatcttcctgcagttttctataatcagtatttcaagcatccaaaatgtgtaggagaatatggacccaagaacggagcagagagacaaatagaggaatggaaagttttgcctacaaccatgatgttctcaatgttagctgactgtgttctaaaatccactccaattcccattttgggagttgctatg

SEQ ID NO: 5551 - DNA, 1893 bp, Homo Sapiens
gagatggacgaagttggagttcaaaaatgcaagaatgccttgaaactacctgtcctggaagtcctacctggagggggctgggacaatctgcggaatgtggacatgggacgagttatggaattgacttactccaactgcaggacaacagaggatggacagtatatcatccctgatgaaatcttcaccattccccagaaacagagcaacctggagatgaactcagaaatcctggaatcctgggcaaattaccagagtagcacctcctactccatcaacacagaactctctcttttttccaaagtcaatggcaagttttccactgagttccagaggatgaagaccctccaagtgaaggaccaagctataactacccgagttcaggtaagaaacctcgtctacacagtcaaaatcaacccaactttagagctaagctcaggttttaggaaggaactccttgacatctctgaccgtctagagaacaaccagacgaggatggccacctacctggcagaactcctggtgctcaactatggcacccacgtcaccaccagtgtcgacgctggggctgctcttattcaggaggaccacctcagggcctccttcctccaagacagccagagcagtcgtagtgccgtgaccgcctctgctggacttgcctttcaaaacaccgtgaacttcaaatttgaggaaaactatacctcgcagaatgtcctcaccaagagctacctctcaaaccgaaccaactccagggtgcagagcattggaggggttcctttttacccaggcatcaccctccaggcctggcagcagggtatcaccaaccacctggtggccatcgaccgctctggcctgccgctgcatttcttcatcaaccccaacatgctacctgacttgccaggccccctggtgaagaaggtgtcaaagacagtggaaactgctgtgaagcgctattatacattcaacacctaccctggctgcacagatctcaattctcccaacttcaattttcaggccaacacggatgatggctcctgcgaggggaaaatgaccaacttctctttcggtggggtttatcaggaatgcactcagctctcagggaatagggatgtcctcctctgccaaaagttggagcagaagaatccactcactggtgatttctcctgcccctctggctactccccggtgcacctgttatcccagatccacgaggagggttacaaccacctggagtgtcatcgaaagtgcactctcctcgtcttctgcaagaccgtgtgtgaagatgtgttccaggtggcaaaagctgaatttagggctttttggtgtgtggccagcagccaagtacctgaaaactcaggactgctttttgggggcctcttcagcagcaagagcataaaccccatgacaaatgcacagtcatgcccagccggctactttccactgagactctttgaaaacctcaaggtatgtgtttctcaggactatgagttgggaagcaggtttgcggtcccctttggcgggttctttagctgcacagttgggaaccccctggtagatcctgctatatccagagatttaggggcactgtctctgaaaaagtgccccgggggcttcagccagcacccagccctcatcagcgatggatgccaagtgtcctattgcgtcaaatccgggctcttcacaggagggtccctgccccctgccaggctcccacctttcacccggccacccctcatgagtcaggctgccaccaatactgtcatagtgaccaattctgagaatgcgagatcctggattaaagactcccagacccaccagtggaggctgggagaaccgatagagctgcggagggccatgaatgtcatccatggggatggtggtggtctgtcaggaggg

SEQ ID NO: 5552 - DNA, 1272 bp, Homo Sapiens
aagtctatctcttgtctaaaacctgctcgacttccaatttatcaaaggaaaccttttatagctgcttggaatgctccaacagatcagtgtttgataaaatataatttaagactaaatttgaaaatgtttcctgtgattggaagcccactggccaaggccagggggcaaaatgtcactatattttatgtcaacagattgggatactatccgtggtatacatcacaaggggtccccattaatggaggtctcccacagaacataagtttacaagtacatctggaaaaagctgaccaagatattaattattacatccctgctgaagatttcagtggacttgctgttatagattgggaatattggcgaccacagtgggcccggaactggaactcaaaagatgtttacagacagaagtcaagaaagcttatttccgatatgggaaagaatgtatcagctaccgatattgaatatttagccaaagtgacctttgaagaaagtgcaaaagctttcatgaaggaaaccatcaaattgggaattaagagccgacccaaaggcctttggggttattatttatatcctgattgccacaattataacgtttatgccccaaactactctgggtcatgcccagaagacgaagtcttgaggaacaatgagctctcttggctctggaacagcagtgctgctttatatccttctatcggtgtctggaaatcccttggagacagtgaaaacattttgcgcttctccaaatttcgggtgcatgaatccatgaggatctctaccatgacatctcatgattatgctctgcctgtatttgtctacacaaggctagggtacagagatgaacctttatttttcctttctaagcaagatctagtcagcaccataggagaaagtgctgccttgggagctgcaggcattgttatttggggagacatgaatttaacttcatccaaggccaactgtacaaaggtgaagcagtttgtgagttctgatttagggagctacatagccaatgtgaccagagctgctgaggtatgcagccttcacctctgcaggaacaatggcaggtgcataaggaagatgtggaacgcgcccagttaccttcacttgaaccctgcaagttaccacatagaggcctctgaggacggggagtttactgtgaaaggaaaagcatctgatacagacctggcagtgatggcagatacattttcctgtcattgttatcagggatatgaaggagctgattgcagagaaataaagacggctgat

SEQ ID NO: 5553 - DNA, 729 bp, Homo Sapiens
agccgggggatcaaggggaaaaggcagaggcggatcagtgccgaggggagccaggcctgtgccaaaggctgtgagctctgctctgaagtcaacggctgcctcaagtgctcacccaagctgttcatcctgctggagaggaacgacatccgccaggtgggcgtctgcttgccgtcctgcccacctggatacttcgacgcccgcaaccccgacatgaacaagtgcatcaaatgcaagatcgagcactgtgaggcctgcttcagccataacttctgcaccaagtgtaaggagggcttgtacctgcacaagggccgctgctatccagcttgtcccgagggctcctcagctgccaatggcaccatggagtgcagtagtcctgcgcaatgtgaaatgagcgagtggtctccgtgggggccctgctccaagaagcagcagctctgtggtttccggaggggctccgaggagcggacacgcagggtgctacatgcccctgtgggggaccatgctgcctgctctgacaccaaggagacccggaggtgcacagtgaggagagtgccgtgtcctgaggggcagaagaggaggaagggaggccagggccggcgggagaatgccaacaggaacctggccaggaaggagagcaaggaggcgggtgctggctctcgaagacgcaaggggcagcaacagcagcagcagcaagggacagtggggccactcacatctgcagggcctgcc

SEQ ID NO: 5554 - DNA, 1695 bp, Homo Sapiens
cagaccgatgccaccccggcggtgacgacagagggcctcaactccaccgaggcagccctggccaccttcggaactttcccgtcgaccaggccccccgggactcccagggctccagggccctcctccggccccaggcctaccccagtcacggacgttgctgttctctgtgtctgtgacttatccccagcacagtgtgacatcaactgctgctgtgatcccgactgcagctccgtggatttcagtgtcttttctgcctgctcagttccagttgtcacgggcgacagccagttttgtagtcaaaaagcagtcatctattcattgaattttacagcaaacccacctcaaagagtatttgaacttgttgaccagattaatccatctattttctgcattcatattacaaactataaacctgcattatcctttattaatccagaagtacctgatgaaaacaattttgatacattgatgaaaacatctgatggttttacattgaatgctgaatcatatgtttccttcacaaccaaactggatattcctactgctgctaaatatgagtatggggttcctctgcagacttcagattcgtttctgagatttccttcgtccctgacatcatctctgtgcactgataataaccctgcagcgtttctggtgaaccaggctgttaagtgcaccagaaaaataaatttagaacagtgtgaagaaattgaagccctcagcatggctttttacagcagcccggaaattctgagggtacctgattcaagaaaaaaggtccctatcactgttcagtccatcgtcattcagtctctaaataaaacgctcacccgacgggaggacactgatgtgctgcagccgactctcgtcaacgctggacactttagcctttgcgtgaatgttgttcttgaggtaaagtacagcctcacatacacagatgcaggtgaagtcaccaaagctgatctctcattcgttctggggacagttagcagcgtagtggtcccactgcagcaaaagtttgaaattcattttcttcaggaaaatacccagccagtccctctcagtggaaaccctggttatgtcgtggggctcccattagctgctggattccagcctcataaggggtctgggattattcagaccacaaatagatatggacagcttactattcttcatagcacaactgagcaagactgcttagcactggagggggtccggaccccagtattatttggttacactatgcaatctggctgtaaactaagactgactggagctctcccgtgtcagctcgtagcacagaaggtgaagagcctgctgtggggccagggcttcccagattacgtggccccttttggaaattcccaggcccaggacatgctggactgggtgcccatccacttcatcacccagtcattcaacaggaaggattcctgccagctcccaggggctttggttatagaagtgaagtggactaaatacggatccctgctgaatccacaggccaaaatagtcaatgtaactgcaaatctaatttcatcctcctttcctgaggccaactcaggaaatgaaaggacgattcttatttccactgcggttacttttgtggatgtgtctgcacctgcagaggcaggcttcagagctccaccagccatcaatgccaggctgccctttaacttcttcttcccgtttgtt

SEQ ID NO: 5555 - DNA, 894 bp, Homo Sapiens
agtccgagcatcccgctggagaagctggcccaggcaccagagcagccgggccaggagaagcgtgagcacgcctctcgggacggcccggggcgggtgaacgagctcgggcgcccggcgagggacgagggcggcagcggccgggactggaagagcaagagcggccgtgggctcgccggccgtgagccgtggagcaagctgaagcaggcctgggtctcccagggcgggggcgccaaggccggggatctgcaggtccggccccgcggggacaccccgcaggcggaagccctggccgcagccgcccaggacgcgattggcccggaactcgcgcccacgcccgagccacccgaggagtacgtgtacccggactaccgtggcaagggctgcgtggacgagagcggcttcgtgtacgcgatcggggagaagttcgcgccgggcccctcggcctgcccgtgcctgtgcaccgaggaggggccgctgtgcgcgcagcccgagtgcccgaggctgcacccgcgctgcatccacgtcgacacgagccagtgctgcccgcagtgcaaggagaggaagaactactgcgagttccggggcaagacctatcagactttggaggagttcgtggtgtctccatgcgagaggtgtcgctgtgaagccaacggtgaggtgctatgcacagtgtcagcgtgtccccagacggagtgtgtggaccctgtgtacgagcctgatcagtgctgtcccatctgcaaaaatggtccaaactgctttgcagaaaccgcggtgatccctgctggcagagaagtgaagactgacgagtgcaccatatgccactgtacttatgaggaaggcacatggagaatcgagcggcaggccatgtgcacgagacatgaatgcaggcaaatg

SEQ ID NO: 5556 - DNA, 594 bp, Homo Sapiens
ggggacacccgaccacgtttcttgcagcaggataagtatgagtgtcatttcttcaacgggacggagcgggtgcggttcctgcacagagacatctataaccaagaggaggacttgcgcttcgacagcgacgtgggggagtaccgggcggtgacggagctggggcggcctgacgctgagtactggaacagccagaaggacttcctggaagacaggcgcgccgcggtggacacctactgcagacacaactacggggttggtgagagcttcacagtgcagcggcgagttgagcctaaggtgactgtgtatcctgcaaggacccagaccctgcagcaccacaacctcctggtctgctctgtgaatggtttctatccaggcagcattgaagtcaggtggttccggaacagccaggaagagaaggctggggtggtgtccacaggcctgattcagaatggagactggaccttccagaccctggtgatgctggaaacagttcctcgaagtggagaggtttacacctgccaagtggagcacccaagcgtgacgagccctctcacagtggaatggagagcacagtctgaatctgcacagagcaag

SEQ ID NO: 5557 - DNA, 171 bp, Homo Sapiens
atgtttgggaatgatggagtcaaagttcgcacctgcactagccagaaagccgtatgtttcttcgggtgtccgccaggatacaggtggattgcgttctgccacaatattctgtcttgctgtaaaaatatgacacgttttcaacccccgcaagccaaagatccatgggttcat

SEQ ID NO: 5558 - DNA, 159 bp, Homo Sapiens
ggacccaatgtctacatacaaaaaatctttgcttcatgttggcgactgcaaggtacttgccggccaaaatgtctaaaaaacgaacaatatcgtattttgtgtgatactatacatttgtgctgtgtaaacccaaaatatttacctatactgactgggaaa

SEQ ID NO: 5559 - DNA, 237 bp, Homo Sapiens
ggcctgttcagatcccacaatggcaagagccgagagccttggaatccatgtgagctttaccaaggcatgtgcagaaacgcctgcagagaatatgaaatccaatacttaacctgcccaaatgatcaaaagtgctgcctgaaactttctgtgaaaataaccagttctaaaaatgtgaaggaggattacgactctaactccaacttgtcagttacaaacagttcaagctactctcacatt

SEQ ID NO: 5560 - DNA, 183 bp, Homo Sapiens
cagactgccccagatggatggatcagaaggtgctattatggaactggcagatgcaggaaatcatgcaaagaaattgagaggaagaaagaaaaatgtggggaaaaacatatttgctgtgtccctaaagaaaaggataaactatcacacattcacgaccaaaaagagacaagtgagctatatatc

SEQ ID NO: 5561 - DNA, 198 bp, Homo Sapiens
ggtccatcagttccacagaaaaaaacaagagaagttgcagagagaaaaagagaatgtcagcttgttcgtggtgcttgcaagccggaatgcaacagctgggaatatgtatattattactgcaatgttaacccctgctgtgcggtatgggaataccaaaagccaatcattaacaaaatcactagtaaactccatcaaaaa

SEQ ID NO: 5562 - DNA, 339 bp, Homo Sapiens
atgaaattattgacaaccatatgtagactgaaacttgaaaaaatgtactcaaagacaaatacatcttccacaatatttgaaaaggcccgacatgggacagagaaaatcagcacagccagaagtgaagggcaccatatcacctttagtaggtggaagtcatgtacagcgattggaggtcgatgtaaaaatcaatgtgatgatagtgaatttaggatttcatactgtgcaagacctacaactcattgctgcgtgacagaatgtgaccctacggacccaaataattggatcccaaaggactcagtagggactcaagaatggtaccctaaagactcacgtcat

SEQ ID NO: 5563 - DNA, 1056 bp, Homo Sapiens
atggaggcaagctcttctggaatcactaatggaaaaaccaaagtcttccacccagaaggaggtgtggatttgcaaggctaccagctggatatgcaaatactacctgacgggccaaagagtgatgtggacttttcagagattcttaatgcaatacaagaaatggccaaggatgtcaatattctttttgatgaattagaagctgtcagcagtccttgcaaagatgacgattctcttcttcaccctggaaacctgactagtacttcagatgatgccagcagattggaagccgggggagagacagtgccagaaagaaacaaatcaaatggactttactttcgagatggaaagtgtcgaattgactacatccttgtgtacagaaaatccaacccccagactgaaaagagagaagtatttgaaagaaacattagagcagaaggattgcaaatggagaaagagtcctctctaataaatagtgacattatctttgtgaagttgcatgccccatgggaagtccttggaagatatgcagaacaaatgaatgtaagaatgcctttcaggagaaaaatctattacctgccccgccgttacaagttcatgagcaggatcgataaacaaataagcaggtttcggagatggttacctaagaagccaatgaggctggacaaggagacactgccagacctggaggagaatgactgctacactgcccctttcagccagcaaaggatccatcacttcatcatacacaacaaagaaacgttcttcaacaatgccacaagaagtagaatcgtgcatcacattttacaaagaataaaatatgaagaaggaaaaaacaagattggtctgaatcgtttgcttaccaatggctcctatgaagctgcgtttcccctgcatgagggaagttatagaagtaaaaactccattcgaacccatggagcagaaaaccaccgacatctactctatgagtgctgggcctcctggggcgtgtggtataaataccaacctttggatcttgtaaggcggtactttggagagaagattgggttatattttgcc

SEQ ID NO: 5564 - DNA, 387 bp, Homo Sapiens
tgtgtcttctgtcgcctcccagcccacgacttgtcaggccgcctggctcggctctgcagccagatggaggccaggcagaaggaatgtggggcctccccagacttctcggcctttgccttagatgaggtgtccatgaacaaagtcacagagaagactcacagagtcctgagggtcatggaaatcaaagaggctgtctcctcactcccttcatattggagttggcttcgaaagaccaagctccctgagtacaccagggaagctctctgtccccccgcctgccggggcagcaccacgctgtacaactgctccacctgcaaggggacggaggtgtcctgctggccccgaaagcgctgcttcccaggaagtcaggatctttgggaagccaag

SEQ ID NO: 5565 - DNA, 216 bp, Homo Sapiens
gcacatttccgggtctgtgaaccatacacagaccacaaaggccgctaccactttggcttccactgcccccggctctcggacaacaagaccttcatcctctgttgtcaccataacaacacggtcttcaaatactgctgcaacgagacggagttccaggcggtgatgcaggcgaacctcacggccagctccgagggttacatgcacaacaattacacc

SEQ ID NO: 5566 - DNA, 1383 bp, Homo Sapiens
gccaaaatcctgacaatatctacagtaggtggaagccattatctactgatggaccgggtttctcagattcttcaagatcacggtcataatgtcaccatgcttaaccacaaaagaggtccttttatgccagattttaaaaaggaagaaaaatcatatcaagttatcagttggcttgcacctgaagatcatcaaagagaatttaaaaagagttttgatttctttctggaagaaactttaggtggcagaggaaaatttgaaaacttattaaatgttctagaatacttggcgttgcagtgcagtcattttttaaatagaaaggatatcatggattccttaaagaatgagaacttcgacatggtgatagttgaaacttttgactactgtcctttcctgattgctgagaagcttgggaagccatttgtggccattctttccacttcattcggctctttggaatttgggctaccaatccccttgtcttatgttccagtattccgttccttgctgactgatcacatggacttctggggccgagtgaagaattttctgatgttctttagtttctgcaggaggcaacagcacatgcagtctacatttgacaacaccatcaaggaacatttcacagaaggctctaggccagttttgtctcatcttctactgaaagcagagttgtggttcattaactctgactttgcctttgattttgctcgacctctgcttcccaacactgtttatgttggaggcttgatggaaaaacctattaaaccagtaccacaagacttggagaacttcattgccaagtttggggactctggttttgtccttgtgaccttgggctccatggtgaacacctgtcagaatccggaaatcttcaaggagatgaacaatgcctttgctcacctaccccaaggggtgatatggaagtgtcagtgttctcattggcccaaagatgtccacctggctgcaaatgtgaaaattgtggactggcttcctcagagtgacctcctggctcacccaagcatccgtctgtttgtcacccacggcgggcagaatagcataatggaggccatccagcatggtgtgcccatggtggggatccctctctttggagaccagcctgaaaacatggtccgagtagaagccaaaaagtttggtgtttctattcagttaaagaagctcaaggcagagacattggctcttaagatgaaacaaatcatggaagacaagagatacaagtccgcggcagtggctgccagtgtcatcctgcgctcccacccgctcagccccacacagcggctggtgggctggattgaccacgtcctccagacagggggcgcgacgcacctcaagccctatgtctttcagcagccctggcatgagcag

SEQ ID NO: 5567 - DNA, 624 bp, Homo Sapiens
ggcttccaagggacagcagccatctggccatccctcttcaacgtcaacttgtccaagaaggttcaggaaagcatccagatcccgaacaatgggagtgcgcccctgctcgtggatgtgcgggtgtttgtctccaacgtgtttaatgtggacatcctgcgatacacaatgtcctccatgctgctgcttaggctgtcctggctggacactcgcctggcctggaacactagtgcacacccgcggcacgccatcacgctgccctgggagtctctctggacaccaaggctcaccatcctggaggcgctctgggtggactggagggaccagagcccccaggctcgagtagaccaggacggccacgtgaagctcaacctggccctcaccacggagaccaactgcaactttgagctcctccacttcccccgggaccacagcaactgcagcctcagcttctacgctctcagcaacacggcgatggagttagagttccaggcccacgtggtgaacgagattgtgagtgtcaagagggaatacgtagtttatgatctgaagacccaagtcccaccccagcagctggtgccctgcttccaggtgacgctgaggctgaagaacacggcgctcaagtcc

SEQ ID NO: 5568 - DNA, 312 bp, Homo Sapiens
gcagcgggcccaaaccgatgtgacaccatataccagggcttcgccgagtgtctcatccgcttgggggacagcatgggccgcggaggcgagctggagaccatctgcaggtcttggaatgacttccatgcctgtgcctctcaggtcctgtcaggctgtccggaggaggcagctgcagtgtgggaatcactacagcaagaagctcgccaggccccccgtccgaataacttgcacactctgtgcggtgccccggtgcatgttcgggagcgcggcacaggctccgaaaccaaccaggagacgctgcgggctacagcg

SEQ ID NO: 5569 - DNA, 360 bp, Homo Sapiens
aaacctctgcagtccgatgaatatgcattgctaaccagaaatgtggagagagataaatatgcaaatttcactattaactttacaatggaaaatcagattcatactggaatggaatacgacaatggcagattcataggggtcaagttcaaatctgtaactttcaaagactctgtttttaagtcctgcacctttgaggatgtaacttcagtgaacacctacttcaagaactgcacatttattgacactgtttttgacaacacagattttgagccatataaattcattgacagtgaatttaaaaactgctcgttttttcacaacaagacgggatgtcagattacctttgatgatgactatagt

SEQ ID NO: 5570 - DNA, 489 bp, Homo Sapiens
cagggccaggaggccggggggcggccaggggccgactgtgaagtatgtaaagaattcttgaaccgattctacaagtcactgatagacagaggagttaacttttcgctggacactatagagaaagaattgatcagtttttgcttggacaccaaaggaaaagaaaaccgcctgtgctattatctaggagccacaaaagacgcagccacaaagatcctaagtgaagtcactcgcccaatgagtgtgcatatgcctgcaatgaagatttgtgagaagctgaagaagttggatagccagatctgtgagctgaaatatgaaaaaacactggacttggcatcagttgacctgcggaagatgagagtggcagagctgaagcagatcctgcatagctggggggaggagtgcagggcctgtgcagaaaaaactgactatgtgaatctcattcaagagctggcccccaagtatgcagcgacacaccccaaaacagagctc

SEQ ID NO: 5571 - DNA, 219 bp, Homo Sapiens
tgcctggatatcgataaactgcttgcgaatgttgtgtttgatgtgtcccaagacctcctgaaggaggagcttgctcgttacaaccccagtcccctgacagaggagtccttcctcaatgtccagcaatgctttgccaatgtctccgtgacagaaagatttgctcattcagttgttattaagaagatccttcagagcaacgattgcatagaagcagccttc

SEQ ID NO: 5572 - DNA, 291 bp, Homo Sapiens
aagggcaaatttgtaggctatccaggagacccagtttattggttgggaaaatacagaaatgaagagtgtgacccaggtggctgtcttcttgaactgacaactcagctgacaataatcatgggaggaaaagcaatctggaataacatacaagaagtattattgccctggatcatgaatctaattgggcgatttcacagagtttctggatcagaaaagataaccccacgatgggaacaggactaccatctgcagcctatgggcaaactgggattattttatgaatatcttgaa

SEQ ID NO: 5573 - DNA, 315 bp, Homo Sapiens
atggcttctcacaacaccctgcagaacttcactgctgccatccctacccaccactgccgcccgcctgccgatgccaacctcagcaagaacggggggctggaggtctggctgccccgggacaggcaggggcagcctgagtcctgcctccgcttcacctccccgcagtggggactgccctttctcaatggcacagaagccaatggcacaggggccacagagccctgcaccgatggctggatctatgacaacagcaccttcccatctaccatcgtgactgagtgggaccttgtgtgctctcacagggccctacgccag

SEQ ID NO: 5574 - DNA, 318 bp, Homo Sapiens
gaactgatgccatctggtgcgattctacagaataagagagaaaatttacccagagtgtgccatgcactggcttttctgggaatggcaaggtgccaggatttgtttttggttcgcttgcaggggtggaaacttggaactaggttccaagatggtccccgcagcaccccacaagaagaaggaggaagcccacagagaaaacggggcatgccagttcaaatccacttccttttaaagagcttcctcagcagcccaataacttttgccttcatctcattggccagaactgtgtcattggctactgctatctgcaagattgtc

SEQ ID NO: 5575 - DNA, 606 bp, Homo Sapiens
atgtgcttccggacaaagctctcagtatcctgggtgccattgtttcttctactcagccgtgttttttctactgagacagacaaaccctcagcccaggacagcagaagccgtgggagttcaggccaaccggcagacctgctacaggttctctctgctggtgaccacccaccccacaaccactcaagaagcctcatcaaaacattgttggagaaaactgggtgcccacggaggagaaacggaatgcaaggagattgcaatctgtgctttgaaccagatgcactattactaatagctggaggaaattttgaagatcagcttagagaagaagtggtccagagagtttctcttctccttctctattacattattcatcaggaagagatctgttcttcaaagctcaacatgagtaataaagagtataaattttacctacacagcctactgagcctcaggcaggatgaagattcctctttcctttcacagaatgagacagaagatatcttggctttcaccaggcagtactttgacacttctcaaagccagtgtatggaaaccaaaacgctgcagaaaaaatctggaatagtgagcagtgaaggtgctaatgaa

SEQ ID NO: 5576 - DNA, 2718 bp, Homo Sapiens
ctctctttagaggccccaaccgtggggaaaggacaagccccaggcatcgaggagacagatggcgagctgacagcagcccccacacctgagcagccagaacgaggcgtccactttgtcacaacagcccccaccttgaagctgctcaaccaccacccgctgcttgaggaattcctacaagaggggctggaaaagggagatgaggagctgaggccagcactgcccttccagcctgacccacctgcacccttcaccccaagtccccttccccgcctggccaaccaggacagccgccctgtctttaccagccccactccagccatggctgcggtacccactcagccccagtccaaggagggaccctggagtccggagtcagagtcccctatgcttcgaatcacagctcccctacctccagggcccagcatggcagtgcccaccctaggcccaggggagatagccagcactacaccccccagcagagcctggacaccaacccaagagggtcctggagacatgggaaggccgtgggttgcagaggttgtgtcccagggcgcagggatcgggatccaggggaccatcacctcctccacagcttcaggagatgatgaggagaccaccactaccaccaccatcatcaccaccaccatcaccacagtccagacaccaggcccttgtagctggaatttctcaggcccagagggctctctggactcccctacagacctcagctcccccactgatgttggcctggactgcttcttctacatctctgtctaccctggctatggcgtggaaatcaaggtccagaatatcagcctccgggaaggggagacagtgactgtggaaggcctgggggggcctgacccactgcccctggccaaccagtctttcctgctgcggggccaagtcatccgcagccccacccaccaagcggccctgaggttccagagcctcccgccaccggctggccctggcaccttccatttccattaccaagcctatctcctgagctgccactttccccgtcgtccagcttatggagatgtgactgtcaccagcctccacccagggggtagtgcccgcttccattgtgccactggctaccagctgaagggcgccaggcatctcacctgtctcaatgccacccagcccttctgggattcaaaggagcccgtctgcatcggtgagtgcccaggggtgatccgcaatgccaccaccggccgcatcgtctctccaggcttcccgggcaactacagcaacaacctcacctgtcactggctgcttgaggctcctgagggccagcggctacacctgcactttgagaaggtttccctggcagaggatgatgacaggctcatcattcgcaatggggacaacgtggaggccccaccagtgtatgattcctatgaggtggaatacctgcccattgagggcctgctcagctctggcaaacacttctttgttgagctcagtactgacagcagcggggcagctgcaggcatggccctgcgctatgaggccttccagcagggccattgctatgagccctttgtcaaatacggtaacttcagcagcagcacacccacctaccctgtgggtaccactgtggagttcagctgcgaccctggctacaccctggagcagggctccatcatcatcgagtgtgttgacccccacgacccccagtggaatgagacagagccagcctgccgagccgtgtgcagcggggagatcacagactcggctggcgtggtactctctcccaactggccagagccctacggtcgtgggcaggattgtatctggggtgtgcatgtggaagaggacaagcgcatcatgctggacatccgagtgctgcgcataggccctggtgatgtgcttaccttctatgatggggatgacctgacggcccgggttctgggccagtactcagggccccgtagccacttcaagctctttacctccatggctgatgtcaccattcagttccagtcggaccccgggacctcagtgctgggctaccagcagggcttcgtcatccacttctttgaggtgccccgcaatgacacatgtccggagctgcctgagatccccaatggctggaagagcccatcgcagcctgagctagtgcacggcaccgtggtcacttaccagtgctaccctggctaccaggtagtgggatccagtgtcctcatgtgccagtgggacctaacttggagtgaggacctgccctcatgccagagggtgacttcctgccacgatcctggagatgtggagcacagccgacgcctcatatccagccccaagtttcccgtgggggccaccgtgcaatatatctgtgaccagggttttgtgctgatgggcagctccatcctcacctgccatgatcgccaggctggcagccccaagtggagtgaccgggcccctaaatgtctcctggaacagctcaagccatgccatggtctcagtgcccctgagaatggtgcccgaagtcctgagaagcagctacacccagcaggggccaccatccacttctcgtgtgcccctggctatgtgctgaagggccaggccagcatcaagtgtgtgcctgggcacccctcgcattggagtgaccccccacccatctgtagggctgcctctctggatgggttctacaacagtcgcagcctggatgttgccaaggcacctgctgcctccagcaccctggatgctgcccac

SEQ ID NO: 5577 - DNA, 1245 bp, Homo Sapiens
gatgcacctcctaccccacagccaaagtgcgctgacttccagagcgccaacctttttgaaggcaccgatctcaaagtccagtttctcctctttgtcccttcgaatcctagctgtgggcagctagtagaaggaagcagtgacctccaaaactctgggttcaatgccactctgggaaccaaactaattatccatggattcagggttttaggaacaaagccttcctggattgacacatttattagaacccttctgcgtgcaacgaatgctaatgtgattgccgtggactggatttatgggtctacaggagtctacttctcagctgtgaaaaatgtgctgggtgtgtcggaatcctcaatccacatcattggtgttagcctgggggcccacgttgggggcatggtgggacagctcttcggaggccagctgggacagatcacaggcctggaccccgctggacctgagtacaccagggccagtgtggaagagcgcttggatgctggagatgccctcttcgtggaagccatccacacagacaccgacaatttgggtattcggattcccgttggacatgtggactacttcgtcaacggaggccaagaccaacctggctgccccaccttcttttacgcaggttatagttatctgatctgtgatcacatgagggctgtgcacctctacatcagcgccctggagaattcctgtccactgatggcctttccctgtgccagctacaaggccttccttgctggacgctgtctggattgctttaacccttttctgctttcctgcccaaggataggactggtggaacaaggtggtgtcaagatagagccgctccccaaggaagtgaaagtctacctcctgactacttccagtgctccgtactgcatgcatcacagcctcgtggagtttcacttgaaggaactgagaaacaaggacaccaacatcgaggttaccttccttagcagtaacatcacctcttcatctaagatcaccatacctaagcagcaacgctatgggaaaggaatcatagcccatgccaccccacaatgccagataaaccaagtgaaattcaagtttcagtcttccaaccgagtttggaaaaaagaccggactaccattattgggaagttctgcactgcccttttgcctgtcaatgacagagaaaagatggtctgcttacctgaaccagtgaacttacaagcaagtgtgactgtttcctgtgacctgaagatagcctgtgtg

SEQ ID NO: 5578 - DNA, 801 bp, Homo Sapiens
gaggttccagaggagagcagcaggatggccgggagcggagccaggagtgaggaaggccgccggcagcatgccttcgtcccggaaccttttgatggggccaatgtcgtcccaaacctctggctgcacagctttgaagtcatcaatgacctcaaccattgggaccatatcaccaagctaaggttcctgaaagagtccctcagaggagaggccctgggtgtctacaataggctcagtccccaggaccagggagactatgggactgtgaaagaggccctcctgaaggcctttggggtccctggggctgcccccagccacctgcccaaagagatcgtctttgccaacagcatgggtaagggctactatctcaaggggaagattggcaaagtgcccgtgaggttcctggtggactctggggcccaggtctctgtggtccacccaaacttgtgggaggaggtcactgatggcgatctggacaccctgcagccctttgagaatgtggtaaaggtggccaatggtgctgaaatgaagatcctgggtgtctgggatacagcggtgtccctaggcaagctgaagctgaaggcacagttcctagtggccaatgcgagtgccgaggaagccatcattggcactgatgtgctccaggaccacaatgctatcctggactttgagcaccgcacatgcaccctgaaagggaagaagtttcgccttctgcctgtgggagggtccctggaagatgagtttgacctggagctcatagaggaggacccctcctcagaagaagggcggcaggagctatcccac

SEQ ID NO: 5579 - DNA, 201 bp, Homo Sapiens
atagaatgtgccaaacagacgaaacagatggttgactgcagtcattataaaaagttaccaccaggacaacagagattttgtcatcatatgtatgatccaatttgtggatctgatggcaaaacttataaaaatgattgcttcttctgttctaaagttaagaaaactgacggcacacttaaatttgtacattttggaaaatgt

SEQ ID NO: 5580 - DNA, 420 bp, Homo Sapiens
atggacagccggattccttatgatgactacccggtggttttcttgcctgcctatgagaatcctccagcatggattcctcctcatgagagggtacaccacccggactacaacaatgagttgacccagtttctgccccgaaccatcacactgaagaagcctcctggagctcagttgggatttaacatccgaggaggaaaggcctcccagctaggcatcttcatctccaaggtgattcctgactctgatgcacatagagcaggactgcaggaaggggaccaagttctagctgtgaatgatgtggatttccaagatattgagcacagcaaggctgttgagatcctgaagacagctcgtgaaatcagcatgcgtgtgcgcttctttccctacaattatcatcgccaaaaagagaggactgtgcac

SEQ ID NO: 5581 - DNA, 1341 bp, Homo Sapiens
aggggctttcccaggccacttgaaaactccgaaatccctatgatccctggagcccaccccaagggctctgtgggctcagagccccaggcctttgacgtgttcccggagaaccccagagctgacagtcacaggaactctgatgtccgccacgcccctgctgaagagatgcctgagaagcctgtagcctctccccttggcccagccctgtacgggcccaaagcagcacaaggagctcagagagaacgactcccagtaactgatgacctccagatggctcaaggaccaagctcccacggctggacaggacctctggactcacaagagcttctggagcaagaagcagtggctccccacccagtgggccaccctcatctcactttcatccccacaactcccagacgtcaactcagggtagccacagttcctccctccctgcagcatgaaggccaagagggacagtggccacctagagatgagggtctgaaggccaaaactaagagcagggtcccacccacttctccctcagaccaccagggcccaccccacacccttgtttcccactcaggtactgtcaagaggccagtgctggaaggacagggtgggtttgaggaacacttgcaggaggcagctcaaggtccccacttcacccagcaggatccagcagcccctgatgttggctcagtacccccagttgaggtggtgtactctcaggagccaggggcccagccagacttggcattggccagaagccttcctcctgctgaggagctgccggttgagacccccaagagggctggcgctgaggtgtcctgggaagtcagctccccaggtcccccgcccaagcaggctgaccttcctgacgctaaggattcaccaggaccccagcccacggatccacccgcctcagaggctcctgatcggccgtctaagccagagagagcagcaatgaatggagcagaccccatctccccccagcgggtgagaggagctgtggaggccccaggcacccccaagtctctcatccctggtccctcagaccctggcccagctgtaaaccgaacagagagccccatgggggccctgcagccagatgaagccgaggagtggccggggcgcccccaaagccatcccccagcacccccagtccaggcgccctcgacgtcacgccggggcctcattcgagtcaccacgcagcgagccctgggccagcctccccctccggagcccaccgccagctccatggcttcagccccagcctccagccccccagccaacgccactgcacccccgctacgctggggcccccttcggcgggtcctgagcttctcctgggagctgcac

SEQ ID NO: 5582 - DNA, 1650 bp, Homo Sapiens
ttagaagaggaggaagaaggggccttactagctcaagctggagagaaactagagcccagcacaacttccacctcccagccccatctcattttcatcctagcggatgatcagggatttagagatgtgggttaccacggatctgagattaaaacacctactcttgacaagctcgctgccgaaggagttaaactggagaactactatgtccagcctatttgcacaccatccaggagtcagtttattactggaaagtatcagatacacaccggacttcaacattctatcataagacctacccaacccaactgtttacctctggacaatgccaccctacctcagaaactgaaggaggttggatattcaacgcatatggtcggaaaatggcacttgggtttttacagaaaagaatgcatgcccaccagaagaggatttgataccttttttggttcccttttgggaagtggggattactatacacactacaaatgtgacagtcctgggatgtgtggctatgacttgtatgaaaacgacaatgctgcctgggactatgacaatggcatatactccacacagatgtacactcagagagtacagcaaatcttagcttcccataaccccacaaagcctatatttttatatattgcctatcaagctgttcattcaccactgcaagctcctggcaggtatttcgaacactaccgatccattatcaacataaacaggaggagatatgctgccatgctttcctgcttagatgaagcaatcaacaacgtgacattggctctaaagacttatggtttctataacaacagcattatcatttactcttcagataatggtggccagcctacggcaggagggagtaactggcctctcagaggtagcaaaggaacatattgggaaggagggatccgggctgtaggctttgtgcatagcccacttctgaaaaacaagggaacagtgtgtaaggaacttgtgcacatcactgactggtaccccactctcatttcactggctgaaggacagattgatgaggacattcaactagatggctatgatatctgggagaccataagtgagggtcttcgctcaccccgagtagatattttgcataacattgaccccatatacaccaaggcaaaaaatggctcctgggcagcaggctatgggatctggaacactgcaatccagtcagccatcagagtgcagcactggaaattgcttacaggaaatcctggctacagcgactgggtcccccctcagtctttcagcaacctgggaccgaaccggtggcacaatgaacggatcaccttgtcaactggcaaaagtgtatggcttttcaacatcacagccgacccatatgagagggtggacctatctaacaggtatccaggaatcgtgaagaagctcctacggaggctctcacagttcaacaaaactgcagtgccggtcaggtatccccccaaagaccccagaagtaaccctaggctcaatggaggggtctggggaccatggtataaagaggaaaccaagaaaaagaagccaagcaaaaatcaggctgagaaaaagcaaaagaaaagcaaaaaaaagaagaagaaacagcagaaagcagtctcaggttcaacttgccattcaggtgttacttgtgga

SEQ ID NO: 5583 - DNA, 1638 bp, Homo Sapiens
aagccgagcttcgtggccgacgggcccggggaggctggcgagcagccctcggccgctccgccccagcctccccacatcatcttcatcctcacggacgaccaaggctaccacgacgtgggctaccatggttcagatatcgagacccctacgctggacaggctggcggccaagggggtcaagttggagaattattacatccagcccatctgcacgccttcgcggagccagctcctcactggcaggtaccagatccacacaggactccagcattccatcatccgcccacagcagcccaactgcctgcccctggaccaggtgacactgccacagaagctgcaggaggcaggttattccacccatatggtgggcaagtggcacctgggcttctaccggaaggagtgtctgcccacccgtcggggcttcgacaccttcctgggctcgctcacgggcaatgtggactattacacctatgacaactgtgatggcccaggcgtgtgcggcttcgacctgcacgagggtgagaatgtggcctgggggctcagcggccagtactccactatgctttacgcccagcgcgccagccatatcctggccagccacagccctcagcgtcccctcttcctctatgtggccttccaggcagtacacacacccctgcagtcccctcgtgagtacctgtaccgctaccgcaccatgggcaatgtggcccggcggaagtacgcggccatggtgacctgcatggatgaggctgtgcgcaacatcacctgggccctcaagcgctacggtttctacaacaacagtgtcatcatcttctccagtgacaatggtggccagactttctcggggggcagcaactggccgctccgaggacgcaagggcacttattgggaaggtggcgtgcggggcctaggctttgtccacagtcccctgctcaagcgaaagcaacggacaagccgggcactgatgcacatcactgactggtacccgaccctggtgggtctggcaggtggtaccacctcagcagccgatgggctagatggctacgacgtgtggccggccatcagcgagggccgggcctcaccacgcacggagatcctgcacaacattgacccactctacaaccatgcccagcatggctccctggagggcggctttggcatctggaacaccgccgtgcaggctgccatccgcgtgggtgagtggaagctgctgacaggagaccccggctatggcgattggatcccaccgcagacactggccaccttcccgggtagctggtggaacctggaacgaatggccagtgtccgccaggccgtgtggctcttcaacatcagtgctgacccttatgaacgggaggacctggctggccagcggcctgatgtggtccgcaccctgctggctcgcctggccgaatataaccgcacagccatcccggtacgctacccagctgagaacccccgggctcatcctgactttaatgggggtgcttgggggccctgggccagtgatgaggaagaggaggaagaggaagggagggctcgaagcttctcccggggtcgtcgcaagaaaaaatgcaagatttgcaagcttcgatcctttttccgtaaactcaacaccaggctaatgtcccaacggatc

SEQ ID NO: 5584 - DNA, 408 bp, Homo Sapiens
atggacatcaagatgcagattggcagcaggaacttctataccttaagcattgactatcccagggttaactacccaaagggtttccggggctattgtaatggtctgatgtcctatatgcgaggcaagatgcaaaattcagattgcccaaagatccattatgtgatacatgccccttggaaggccatccagaagttctgcaagtatagtgacagcttctgtgagaattacaatgaatactgcacactcacccaggattccctccccatcacggtctgctccctgagccaccaacagccacccactagctgctactacaatagcaccctaaccaaccagaagctctacctactctgctcccgcaagtatgaagctgatccaataggtatcgctggtctctattcgggaatt

SEQ ID NO: 5585 - DNA, 381 bp, Homo Sapiens
gaagcagtgatgtcaactttagaacacttgcatgtggactaccctcagaatgacgttcccgttcctgcaaggtactgcaaccacatgatcatacaaagagttatcagggaacctgaccacacttgtaaaaaggagcatgtcttcatccatgagaggcctcgaaaaatcaatggtatttgcatttctcccaagaaggttgcttgccaaaacctttcggccattttctgctttcagagtgagacaaagttcaaaatgacagtctgtcagctcattgaaggcacaagataccctgcctgcaggtaccactattcccccacagaggggtttgttcttgtcacttgtgatgacttgaggccagatagtttccttggctatgttaaa

SEQ ID NO: 5586 - DNA, 570 bp, Homo Sapiens
cttcatatggctacagcagtcttggaggagagtgatcaaccgctcaatgaattttggtccagtgactcacaggacaaagctgaggccactgaggagggagacggcacccaaaccacagaaacgctggtgcttagcaacaaagaagtggtgcaacctggctggccagaagatcccatcctcggtgaagatgaggttgggggtaacaagatgctcagagcctcagctctctttcagagcaacaaagactatcttaggcttgaccagacagatagagaatgcaatgatatgatggcacacaagatgaaggagcccagtcagagttgcatagcccagtatgcattcatccatgaggatctaaacacagtcaaagctgtctgtaacagtcctgtcattgcctgtgagctcaaggggggaaaatgtcacaaaagctcccgaccttttgatttgacattgtgcgagctgtcccaaccagaccaggtcactcctaactgcaattacctaacttctgttataaaaaagcacattattataacctgtaatgacatgaagcgccagttaccaactggacaa

SEQ ID NO: 5587 - DNA, 183 bp, Homo Sapiens
caggtcaccccagtcatgaaatgttggggcaagtcaggcaggtgcagaacaacatgtaaagaaagtgaagtatactatatattatgcaaaactgaggctaagtgctgtgtggatcccaagtatgtacctgtaaaaccaaaattaacagacacaaatacaagcctggaatcaacttctgcagtc

SEQ ID NO: 5588 - DNA, 966 bp, Homo Sapiens
ggctctccagttttgaggaactttacttttgcagtttcctggagaactgagaaaattctttaccggctggatgtgggttggcctaagcacccagaatattttaccggaacaacattttgtgttgcagttgactccctcaatggattggtttacataggtcaaagaggggataacatcccaaagatattagtgttcacagaggatggatatttcctacgagcctggaattatacagttgacacacctcatggtatatttgcagccagtactctatatgaacaatccgtctggatcacggatgtaggaagtggattctttggtcatactgttaaaaaatacagttcttttggtgatcttgttcaagtcttgggtactccaggcaaaaaaggcactagtttgaatcctttgcagtttgataacccagcagaattatatgtagaggacacaggagatatttacattgtggatggagatggaggattgaataacagattgatcaaactgtcccaagatttcatgatcctttggctgcatggagaaaatgggacagggcctgctaagttcaacatacctcacagtgttacacttgattcagctggtcgggtgtgggttgctgaccgaggaaataaaagaatccaagtatttgataaagacactggggagtggttaggagcatggaataattgtttcacagaagagggaccttcttcagtcaggtttactcctgatgggaagtacttgattgtggcccagctgaatcttagcaggctctcagtcgtagcagcacccccagtgggaagcattggggagtgttctgtgatcagcacaatccaactagcagatcaagttttgccacatctcctagaagtcgacagaaagactggagcagtctatgtagcagaaattggagcaaaacaagtacaaaaatatgtccctttgaatagctatgttccttcatttggttca

SEQ ID NO: 5589 - DNA, 225 bp, Homo Sapiens
gccgaacccttcagccctccgcgaggagactcagctcagagcacagcgtgtgacagacacatggctgtgcaacgccgtctagatgtcatggaggagatggtagagaagaccgtggatcacctggggacagaggtgaaaggcctgctgggcctgctggaggagctggcctggaacctgcccccgggacccttcagccccgctcccgaccttctcggagatggcttc

SEQ ID NO: 5590 - DNA, 1215 bp, Homo Sapiens
gtggaggccaccagcgtgctcctgcccacagacatcaagtttgggatcgtgtttgatgcgggctcctcccacacgtccctcttcctgtatcagtggctggcgaacaaggagaatggcacgggtgtggtcagccaggccctggcctgccaggtggaagggcctggaatctcctcctacacttctaatgctgcacaggctggtgagagcctgcagggctgcttggaggaggcgctggtgctgatcccagaggcccagcatcggaaaacacccacgttcctgggggccacggctggcatgaggttgctcagccggaagaacagctctcaggccagggacatctttgcagcagtcacccaggtcctgggccggtctcccgtggacttttggggtgccgagctcctggccgggcaggccgaaggtgcctttggttggatcactgtcaactacggcttggggacgctggtcaagtactccttcactggagaatggatccagcctccggaggagatgctggtgggtgccctggacatgggaggggcctccacccagatcacgttcgtgcctgggggccccatcttggacaagagcacccaggccgattttcgcctctacggctccgactacagcgtctacactcacagctacctgtgctttggacgggaccagatgctgagcaggctcctcgtggggctggtacagagccgcccggctgccctgctccgtcacccgtgctacctcagcggctaccagaccacactggccctgggcccgctgtatgagtcaccctgtgtccacgccacgcccccgctgagcctcccccagaacctcacagttgaagggacaggcaaccctggagcctgcgtctcagccatccgggaacttttcaacttctccagctgccagggccaggaggactgcgcctttgacggggtctaccagcccccgctgcggggccagttctatgtggaggccagctaccctgggcaggaccgctggctgcgggactactgtgcctcaggcctgtacatcctcaccctcctgcacgagggctacgggttcagcgaggagacctggcccagcctcgagttccgaaagcaggcgggcggtgtggacattggctggacactgggctacatgctgaacctgaccgggatgatcccggccgatgcgccggctcagtggcgggcagagagctacggcgtctgggtggccaaa

SEQ ID NO: 5591 - DNA, 369 bp, Homo Sapiens
aggatgtcatcgctcagttttctgaatatagagaagactgaaatactatttttcacaaagactgaagaaaccatccttgtaagttcaagctacgaaaataaacggcctaattccagccacctctttgtgaaaatagaagatcctaaaatactacaaatggtgaatgtggccaagaagatctcatcagatgctacaaactttaccataaatctggtgactgatgaagaaggagaaacaaatgtgactattcaactctgggattctgaaggtaggcaagaaagactcattgaagaaatcaagaatgtgaaagtcaaagtgctcaaacaaaaagacagtctactccaggcaccaatgcatattgatagaaac

SEQ ID NO: 5592 - DNA, 282 bp, Homo Sapiens
gacccccgggacctcaagagctgtaaccgcccctgtgtgtggtcgaggcttttgaaaccaaactctagcctctccaacctagaaactgcatactttccacaaaatttgagatttttgagaccctggtacttttcacgaagtcaccttaattatcaccaaaaagctcctgcaagatgggagtggttatactccatttacaggaaaggaaccaaggctcagagaagaaatgtgctccgttcaccgtgtgctcctcctcagccatcctggccgtgctcagtcatc

SEQ ID NO: 5593 - DNA, 2679 bp, Homo Sapiens
gccactgaggctcgtctgcacccggagggcagcagcagaaagcagcagcgagctcagtcacccgctagaccgagggacagttcgctgcgacagacaatcgcggccacccggtccccagtgggggccggcactaaactcaattctgttcggcagcagcagctgcagcagcagcaacagcagggtaacaagaccgggagccgcacggggccgcccgccagcatccgaggaggcggaggtggggccgagaaggcgacgcccctggcgcccaaaggggccgctccgggagctgtccagcctgtggctggtgctgaagcggcccccgccgcgaccctggccgctttgggcggcaggaggcccggaccgcccgaggagccgcctcgggagctagagtccgtgccctcgaaactcggggaaccccctccgctcggagaagggggaggagggggcggggaaggaggaggagccggcggcggctccggggaaagggaggggggcgctccgcagccgccgccgcccaggggctggcgagggaaaggcgtacgcgctcagcagaggggcggcagcggcggggagggggcctccccttctccatcctcctcttctgcgggcaaaaccccaggaaccggcagcagaaactccggaagcggcgttgcggggggcggcagcggtggtggagggagctactggaaagaaggatgtctgcagtctgagctcatccagttccatctcaagaaggagcgggcggcagcggcggcggccgcggctcagatgcacgctaagaacggcggcggcagcagtagccgcagctccccggtgtctggcccccctgccgtttgcgagaccctggccgtcgcctccgcctccccaatggcggcggcggcggagggcccccagcagagcgcagagggcagcgcgagcggcgggggcatgcaggcggcagcgcccccttcgtcgcagccgcacccgcagcagctccaagagcaggaagaaatgcaagaggagatggagaagctgcgagaggaaaacgagactctcaagaacgagatcgatgagctgagaaccgagatggacgagatgagggacactttcttcgaggaggatgcctgtcaactgcaggaaatgcgccacgagttggagagagccaacaaaaactgccggatcctgcagtaccgcctccgcaaagccgagcgcaaaaggctccgctacgcccagaccggggaaatcgacggggagctgttgcgcagcctggagcaggacctcaaggttgcaaaggatgtatctgtgagacttcaccatgaattagaaaatgtggaagaaaagagaacaacaacagaagatgaaaatgagaaactgaggcaacagctcatagaagttgaaattgcaaagcaagctttacagaatgaactggaaaaaatgaaagagttatccttaaaaagaagaggaagcaaagatttgccaaaatctgaaaaaaaggctcaacagactcccacagaggaggacaatgaagatctgaagtgccagctgcagtttgttaaggaagaagccgctttgatgagaaagaaaatggccaagattgataaagaaaaggacagatttgaacacgagctccagaagtacagatccttttatggggatctggacagtcctttgcccaaaggagaagccggaggccctcccagcactagggaggccgagctcaagctacggctaaggctggtggaggaagaagccaacatcctgggcaggaaaatcgtcgaactggaggtggagaacagaggcctgaaggcggaactggacgaccttaggggcgatgacttcaacggctcggccaacccgctcatgagggagcagagcgaatccctgtcggagctgcggcagcacctgcagctggtggaagacgagacggagctgctgcggaggaacgtggccgacctggaggagcagaacaagcgcatcacggcggagctcaacaagtacaagtacaagtccggcggccacgacagcgcgcggcaccacgacaacgccaagaccgaggccctgcaggaggagctgaaggcggcgcgcctgcagatcaacgagctcagcggcaaggtcatgcagctgcagtacgagaaccgcgtgcttatgtccaacatgcagcgctacgacctggcctcgcacctgggcatccgcggcagcccccgcgacagcgacgccgagagcgacgcgggcaagaaggagagcgacgacgactcgcggcctccgcaccgcaagcgcgaagggcccatcggcggcgagagcgactcggaggaggtgcgcaacatccgctgcctcacgcccactcgctccttctacccggcgcccgggccctggcccaagagcttctccgatcggcagcagatgaaggacatccgctcggaggccgagcgcctgggcaagaccatcgaccggctcatcgccgacacgagcaccatcatcaccgaggcgcgcatctacgtggccaacggggacctgttcggactcatggacgaggaggacgacggcagccgcatccgggagcacgagctgctctaccgcatcaacgctcagatgaaggccttccgcaaggagctgcagaccttcatcgaccgcctcgaggtgcccaagtctgcggacgaccgcggcgccgaggagcccatttccgtgagtcagatgttccag

SEQ ID NO: 5594 - DNA, 582 bp, Homo Sapiens
agcggctgccgggccgggactggtgcgcgaggggctggggcggaaggtcgagagggcgaggcctgtggcacggtggggctgctgctggagcactcatttgagatcgatgacagtgccaacttccggaagcggggctcactgctctggaaccagcaggatggtaccttgtccctgtcacagcggcagctcagcgaggaggagcggggccgactccgggatgtggcagccctgaatggcctgtaccgggtccggatcccaaggcgacccggggccctggatggcctggaagctggtggctatgtctcctcctttgtccctgcgtgctccctggtggagtcgcacctgtcggaccagctgaccctgcacgtggatgtggccggcaacgtggtgggcgtgtcggtggtgacgcaccctgggggctgccggggccatgaggtggaggacgtggacctggagctgttcaacacctcggtgcagctgcagccgcccaccacagccccaggccctgagacggcggccttcattgagcgcctggagatggaacaggcccagaaggccaagaacccccaggagcagaagtcc

SEQ ID NO: 5595 - DNA, 1140 bp, Homo Sapiens
tatgacaagaaaggaaacaatgcaaaccctgaagctaatatgaatattagccagattatttcttactggggttatccttatgaagagtatgatgttacaacaaaagatggttatatccttggaatttataggattccacatggaagaggatgcccagggaggacagctccaaagcctgctgtgtatttgcagcatggcttaattgcatctgccagtaactggatttgcaacctgcccaacaacagtttggctttccttctggcagatagtggttatgacgtgtggttggggaacagccgaggaaacacttggtccagaaaacaccttaaattgtcaccgaaatcaccggaatactgggccttcagtttggatgagatggctaaatatgaccttccagccacaatcaattttatcatagagaaaactggacagaagcgactctactacgtgggccactcacaaggcaccaccatagcttttatagcattttctacaaacccagaactggctaaaaagattaagatattttttgcactggctccagttgtcacagttaaatacacccaaagtcctatgaaaaaactaacaaccctttccaggcgagtagttaaggtgttgtttggtgacaaaatgttccaccctcatacattgtttgaccaattcattgccaccaaagtgtgcaatcgaaagctattccgtcgtatttgcagcaacttcctatttactctgagtggatttgatccgcaaaacttaaatatgagtcgcttggatgtttatttgtcacacaatcctgcgggaacatctgttcagaatatgctgcactgggctcaggctgttaattctggtcagctccaagcttttgattggggaaactctgatcagaacatgatgcacttccatcagcttacacctcctttatacaacattactaagatggaagttccaacagcaatatggaatggtggacaggacattgtggctgatcccaaggatgttgaaaatttacttcctcaaattgctaaccttatttattacaagctgattccacactacaatcatgtggatttttaccttggagaggatgcacctcaggaaatttaccaagacctaattatattgatggaagaatatttacaaaat

SEQ ID NO: 5596 - DNA, 1281 bp, Homo Sapiens
caagccatggaaggtgtcaaatgtgggggtgtgctctcagcaccttctggaaacttctccagccccaacttccctagactgtacccctacaacacagagtgcagctggctgatcgtggtggccgagggatcctcggtgctgctcaccttccatgcctttgacctagagtaccacgacacctgcagcttcgactttctggagatctacaatggggcctcaccagacaagggcaacctgctggggaggttctgcggcaaggtgcccccgccgcccttcacctcctcctggcatgtcatgtctgtcatcttccactcggacaagcatgtggccagccatggcttttctgcgggctaccagaaagatgtgtgtggcggcgtcctgactggcctgtcaggggtcctcaccagtcctgagtatcccaacaactacccgaacagcatggagtgccactgggtgatccgggccgctggccctgcccacgtcaagctggtgttcgtggacttccaggtggagggcaatgaagagtgcacctatgactacgtggctgtgcttggggggcctggccccacccgtgggcaccactactgtggcagcaccaggccccccaccctcgtgtctctgggccacgaactgcaggtggtcttcaagtccgacttcaacatcggaggccgtggcttcaaggcctactacttctcaggagaatgccaggaggtatacatggccatgcggggcaacttctccagcccacagtaccccagctcctaccccaacaacatccgctgccactggaccatccgcctgcccccgggctaccaggtcaaggtgttcttcctggacctggacctggaggagcccaacagcctgaccaagacctgtgactttgaccatctggcggccttcgatggggccagcgaggaggcacccctgctggggaattggtgtggacaccacctgccaccacccgtgacctcaagccacaaccagcttctgcttctgctgcacacagaccgcagcaccacccgcaggggcttctctgtggcctacatcggaggtcagctgggctgtgggagtgggtccactgagggcgaaggggaggctttgcagcctcagtctttgcagtctccttcctccatcccaccagtttgtcctgccccccccatgaatggtcttctccagctccttctccattggctacacccttgcccactctcgggacccctaagactggacggtacggctcccgcttgtttccactattgcagagcctccttccccagcttc

SEQ ID NO: 5597 - DNA, 393 bp, Homo Sapiens
tggtgttctgaagaggaaatgggtggtaataataaaatagtccaggatcctatgttcctcgccacagtggagtttgccttgaacactttcaacgtgcagagcaaggaggagcatgcctacaggctgttgcgcgtcctgagttcatggagggaggatagcatggacagaaagtggcgaggtaagatggtgttctccatgaatctgcaactgcgccaaaccgtatgtaggaaatttgaagatgacattgacaactgcccttttcaagaaagcctggagctgaacaacgtaagacagggcatcagctttcctcaggtccacagctgtggatgctgcatggggtgtggtgtgggcacaggagcagctgacaaagccattccgagggacaaagggaag

SEQ ID NO: 5598 - DNA, 2184 bp, Homo Sapiens
attgtcctcacagggacaagcgagcccccagatgcgcagacagtggcgcctgcggaggacgagactctgcaaaacgaggcggacaaccaggagaacgttttatctcagttgctgggggactatgacaaggtcaaggctatgtctgagggctcggactgtcagtgcaagtgtgtggtgagacccctgggccgggatgcctgccagaggatcaatgcgggggcctccaggaaggaagacttctataccgtggaaaccatcacctcaggctcgtcgtgcaagtgtgcctgtgtagcacccccatcggccctcaatccctgcgagggagacttcaggctccagaagctgcgggaggcagacagccaggacttgaagctctccacaatcatagacatgttggaaggagcgttctatggcctggatctcctgaagctacattcagtcaccaccaaactggtggggcgagtggataaactggaggaggaagtgtctaaaaacctcaccaaggaaaacgaacaaatcaaagaggacatggaagaaattcgaaccgagatgaataagcgaggcaaagaaaattgctctgaaaacatcctagatagcatgccagacatccgctcagccctgcagagggatgcagcagcagcctacgcccacccagagtatgaagagcggtttctgcaggaagaaaccgtgtcccagcagatcaactccatcgaacttctgcagacgcgacccctggctctgcctgaggtggtgaagtcacagcggcccctgcagaggcaggtccacctgagaggccggccggcctcccagcccactgtcatccggggcatcacctactataaagccaaggtctctgaagaagagaatgacattgaagagcagcaagatgagtttttcagcggtgacaatggagtggatttgctgattgaagatcagctcctgagacacaacggcctgatgaccagtgtcacccggaggcctgcagccacccgtcagggacacagcactgctgtgacaagcgacctgaacgctcggaccgcaccctggtcctcagcactgccacagccctcgacctcagatcccagcatcgccaaccatgcctcagtgggaccaacactccaaacaacctcggtgtctccagatcccacaagggagtcagtcctgcagccttctcctcaggtaccagccaccactgtggcccacacagccacccagcaaccagcagccccagctcctccggcagtgtctcccagggaggcattgatggaagctatgcacacagtcccagtgcctcccaccacagtcagaacagactcgctggggaaagatgctcctgctgggtggggaacaacccctgccagccccacgctgagccccgaagaagaagatgacatccggaatgtcataggaaggtgcaaggacactctctccacaatcacggggccgaccacccagaacacatatgggcggaatgaaggggcctggatgaaggaccccctggccaaggatgagcggatttacgtaaccaactattactacggcaacaccctggtagagttccggaacctggagaacttcaaacaaggtcgctggagcaattcctacaagctcccgtacagctggatcggcacaggccacgtggtatacaatggcgccttctactacaatcgcgccttcacccgcaacatcatcaagtacgacctgaagcagcgctacgtggctgcctgggccatgctgcatgacgtggcctacgaggaggccaccccctggcgatggcagggccactcagacgtggactttgctgtggacgagaatggcctatggctcatctacccggccctggacgatgagggcttcagccaggaggtcattgtcctgagcaagctcaatgccgcggacctgagcacacagaaggagaccacatggcgcacggggctccggaggaatttctacggcaactgcttcgtcatctgtggggtgctgtatgccgtggatagctacaaccagcggaatgccaacatctcctacgctttcgacacccacaccaacacacagatcgtccccaggctgctgttcgagaatgagtattcctatacgacccagatagactacaaccccaaggaccgcctgctctatgcctgggacaatggccaccaggtcacttaccatgtcatctttgcctac

SEQ ID NO: 5599 - DNA, 156 bp, Homo Sapiens
ctggatgttagtacgacaatatacaaccggtgcaagcatgctgctgcaaattcaagccctcctgagaatagcaacattacaggattgtacgcaactgctaaccctgttccaagccagcatccttgtttcaagccatggagttacattcctgatgga

SEQ ID NO: 5600 - DNA, 522 bp, Homo Sapiens
ggctttggacgcacaggactggtactggcagcagcggtggagtctgaaagatcagcagaacagaaagctattatcagagtgatccccttgaaaatggaccccacaggaaaactgaatctcactttggaaggtgtgtttgctggtgttgctgaaataactccagcagaaggaaaattaatgcagtcccacccgctgtacctgtgcaatgccagtgatgacgacaatctggagcctggattcatcagcatcgtcaagctggagagtcctcgacgggccccccgcccctgcctgtcactggctagcaaggctcggatggcgggtgagcgaggagccagtgctgtcctctttgacatcactgaggatcgagctgctgctgagcagctgcagcagccgctggggctgacctggccagtggtgttgatctggggtaatgacgctgagaagctgatggagtttgtgtacaagaaccaaaaggcccatgtgaggattgagctgaaggagcccccggcctggccagattat

SEQ ID NO: 5601 - DNA, 264 bp, Homo Sapiens
gggttccgcgccacgcagcgctacgacgactgcttcagcacgaacatcctgaccctcatcaacgggttcgacctgcctgaaggcaacgtgacccaggagaactttgtggacatgcagcagcggtgcaacgcctccgaccccgcggcctacgcgcagctggtgttccagacctgcgacatcaacgccttcctctcagaggccgtggagggcacaggcctggccttcatcgtcttcaccgaggccatcaccaagatgccgttgtcc

SEQ ID NO: 5602 - DNA, 1365 bp, Homo Sapiens
ggccccctgcagagcggagaggaaagcactgggacaaatattggggaggcccttggacatggcctgggagacgccctgagcgaaggggtgggaaaggccattggcaaagaggccggaggggcagctggctctaaagtcagtgaggcccttggccaagggaccagagaagcagttggcactggagtcaggcaggttccaggctttggcgcagcagatgctttgggcaacagggtcggggaagcagcccatgctctgggaaacactgggcacgagattggcagacaggcagaagatgtcattcgacacggagcagatgctgtccgcggctcctggcagggggtgcctggccacaatggtgcttgggaaacttctggaggccatggcatctttggctctcaaggtggccttggaggccagggccagggcaatcctggaggtctggggactccgtgggtccacggataccccggaaactcagcaggcagctttggaatgaatcctcagggagctccctggggtcaaggaggcaatggagggccaccaaactttgggaccaacactcagggagctgtggcccagcctggctatggttcagtgagagccagcaaccagaatgaagggtgcacgaatcccccaccatctggctcaggtggaggctccagcaactctgggggaggcagcggctcacagtcgggcagcagtggcagtggcagcaatggtgacaacaacaatggcagcagcagtggtggcagcagcagtggcagcagcagtggcggcagcagtggcggcagcagtggtggcagcagtggcaacagtggtggcagcagaggtgacagcggcagtgagtcctcctggggatccagcaccggctcctcctccggcaaccacggtgggagcggcggaggaaatggacataaacccgggtgtgaaaagccagggaatgaagcccgcgggagcggggaatctgggattcagaactctgagacgtctcctgggatgtttaactttgacactttctggaagaattttaaatccaagctgggtttcatcaactgggatgccataaacaagaaccaggtcccgccccccagcacccgagccctcctctacttcagccgactctgggaggatttcaaacagaacactcctttcctcaactggaaagcaattattgagggtgcggacgcgtcatcactgcagaaacgtgcaggcagagccgatcagaactacaattacaaccagcatgcgtatcccactgcctatggtgggaagtactcagtcaagacccctgcaaaggggggagtctcaccttcttcctcggcttcccgggtgcaacctggcctgctgcagtgggtgaagttttgg

SEQ ID NO: 5603 - DNA, 984 bp, Homo Sapiens
gtgcgcggcgcgccctgcgaggcggtgcgcatccctatgtgccggcacatgccctggaacatcacgcggatgcccaaccacctgcaccacagcacgcaggagaacgccatcctggccatcgagcagtacgaggagctggtggacgtgaactgcagcgccgtgctgcgcttcttcctctgtgccatgtacgcgcccatttgcaccctggagttcctgcacgaccctatcaagccgtgcaagtcggtgtgccaacgcgcgcgcgacgactgcgagcccctcatgaagatgtacaaccacagctggcccgaaagcctggcctgcgacgagctgcctgtctatgaccgtggcgtgtgcatctcgcctgaagccatcgtcacggacctcccggaggatgttaagtggatagacatcacaccagacatgatggtacaggaaaggcctcttgatgttgactgtaaacgcctaagccccgatcggtgcaagtgtaaaaaggtgaagccaactttggcaacgtatctcagcaaaaactacagctatgttattcatgccaaaataaaagctgtgcagaggagtggctgcaatgaggtcacaacggtggtggatgtaaaagagatcttcaagtcctcatcacccatccctcgaactcaagtcccgctcattacaaattcttcttgccagtgtccacacatcctgccccatcaagatgttctcatcatgtgttacgagtggcgttcaaggatgatgcttcttgaaaattgcttagttgaaaaatggagagatcagcttagtaaaagatccatacagtgggaagagaggctgcaggaacagcggagaacagttcaggacaagaagaaaacagccgggcgcaccagtcgtagtaatccccccaaaccaaagggaaagcctcctgctcccaaaccagccagtcccaagaagaacattaaaactaggagtgcccagaagagaacaaacccgaaaagagtg

SEQ ID NO: 5604 - DNA, 735 bp, Homo Sapiens
tgcggggtccccgccatccaccctgtgctcagcggcctgtccaggatcgtgaatggggaggacgccgtccccggctcctggccctggcaggtgtccctgcaggacaaaaccggcttccacttctgcgggggctccctcatcagcgaggactgggtggtcaccgctgcccactgcggggtcaggacctccgacgtggtcgtggctggggagtttgaccagggctctgacgaggagaacatccaggtcctgaagatcgccaaggtcttcaagaaccccaagttcagcattctgaccgtgaacaatgacatcaccctgctgaagctggccacacctgcccgcttctcccagacagtgtccgccgtgtgcctgcccagcgccgacgacgacttccccgcggggacactgtgtgccaccacaggctggggcaagaccaagtacaacgccaacaagacccctgacaagctgcagcaggcagccctgcccctcctgtccaatgccgaatgcaagaagtcctggggcaggaggatcaccgacgtgatgatctgtgccggggccagtggcgtctcctcctgcatgggtgactctggaggccccctggtctgccagaaggacggagcctggaccctggtgggcattgtgtcctggggcagccgcacctgctctaccaccacgcccgctgtgtacgcccgtgtcaccaagctcataccctgggtgcagaagatcctggccgccaac

SEQ ID NO: 5605 - DNA, 1635 bp, Homo Sapiens
ctccccgtgaagaagccgcggctccgcggaccacggcctgggagcctcacgaggctcgcagaggtctcagcctccccagatcctaggcctctgaaggaagaggaggaggcaccactgctccccagaacccacctgcaggcagagccacaccaacatggatgctggactgtcactgagccagcagccatgaccccaggcaacaccacccctcccaggaccccagaggttactccgttgcggctggagctgcagaagctgccgggattggccaacacaaccttgagtacccctaaccctgatacccaggcttcagcctccccagatcctaggcctctgagggaagaggaggaggcacgactgctccccagaacccacctgcaggcagagctacaccaacatggatgttggactgtcactgagccagcagccctgaccccagggaatgccacgcctcccaggacccaggaggttactcccttgctgctggagctgcagaagctgccagaattggtccacgcaaccttgagtacccctaaccctgataaccaggtgaccatcaaggtggtggaggacccccaggccgaggtgtcgatagacctgttggctgagcccagcaatcccccgccccaggatacccttagctggctgcccgccctctggtccttcctctggggagactacaaaggagaggaaaaagacagggccccaggggagaagggggaggaaaaggaggaagacgaggactatccttcagaggatatcgagggtgaggatcaagaggacaaagaggaagatgaggaagagcaggcgctctggttcaatggaactacagacaactgggaccagggctggctggcccccggggattgggtcttcaaggattctgtcagctacgactatgagcctcagaaggagtggagtccctggtctccctgcagtgggaactgcagcactggcaagcagcagaggactcggccctgtggctatggctgcactgccaccgagacccgtacctgtgacctgccctcctgtcctggcactgaggacaaggacaccttgggcctccccagtgaggagtggaagctcctggcccgcaatgctacggacatgcatgatcaagatgtggacagctgtgagaagtggctgaactgcaagagcgacttcctaatcaagtatctgagccagatgctgcgggacctgcccagctgcccgtgtgcctacccactggaggccatggacagccctgtgagcctacaggacgagcaccagggccgcagcttccggtggagggatgccagtggccctcgcgagcgcctggacatctaccagcccacggcgcgcttctgcctgcgttccatgctgtctggggagagcagcacactggccgcccagcactgctgctatgacgaggacagccggctgctgacccgtggcaagggcgccggcatgcccaacctcatcagcaccgacttctcacctaagctgcacttcaagttcgacacgacgccctggatcctgtgcaagggggactggagccgcctccacgctgtgctccctcccaacaacggccgagcctgcaccgacaaccccctggaggaggagtacctagcacagttgcaggaggccaaggagtac

SEQ ID NO: 5606 - DNA, 1224 bp, Homo Sapiens
gcgcccctggcctccagctgcgcaggagcctgtggtaccagcttcccagatggcctcacccctgagggaacccaggcctccggggacaaggacattcctgcaattaaccaagggctcatcctggaagaaaccccagagagcagcttcctcatcgagggggacatcatccggccgagtcccttccgactgctgtcagcaaccagcaacaaatggcccatgggtggtagtggtgtcgtggaggtccccttcctgctctccagcaagtacgatgagcccagccgccaggtcatcctggaggctcttgcggagtttgaacgttccacgtgcatcaggtttgtcacctatcaggaccagagagacttcatttccatcatccccatgtatgggtgcttctcgagtgtggggcgcagtggagggatgcaggtggtctccctggcgcccacgtgtctccagaagggccggggcattgtccttcatgagctcatgcatgtgctgggcttctggcacgagcacacgcgggccgaccgggaccgctatatccgtgtcaactggaacgagatcctgccaggctttgaaatcaacttcatcaagtctcggagcagcaacatgctgacgccctatgactactcctctgtgatgcactatgggaggcttgccttcagccggcgtgggctgcccaccatcacaccactttgggcccccagtgtccacatcggccagcgatggaacctgagtgcctcggacatcacccgggtcctccaactctacggctgcagcccaagtggccccaggccccgtgggagagggtcccatgcccacagcactggtaggagccccgctccggcctccctatctctgcagcggcttttggaggcactgtcggcggaatccaggagccccgaccccagtggttccagtgcgggaggccagcccgttcctgcagggcctggggagagcccacatgggtgggagtcccctgccctgaaaaagctcagtgcagaggcctcggcaaggcagcctcagaccctggcttcctccccaagatcaaggcctggagcaggtgcccccggtgttgctcaggagcagtcctggctggccggagtgtccaccaagcccacagtcccatcttcagaagcaggaatccagccagtccctgtccagggaagcccagctctgccagggggctgtgtacctagaaatcatttcaaggggatgtccgaagat

SEQ ID NO: 5607 - DNA, 228 bp, Homo Sapiens
tctgtttcaggccctagacactggtggccaccacgtggaattattaaggtgaaatgtccatatgagaaagtaaacttgagctggtacaatggaacggtcaacccctgccctggcttatatcaacccatctgcggcaccaattttataacctatgataatccctgcattctgtgtgttgagagcttgaaatctcatggaagaatcaggttttaccatgatggaaaatgt

SEQ ID NO: 5608 - DNA, 369 bp, Homo Sapiens
acaccctttccttctctggccccaccaatcatgctgctggtggatggaaagcagcagatggtggtggtctgcctggtccttgatgttgcaccccctggccttgacagccccatctggttctcagccggcaatggcagtgcactggatgccttcacctatggcccttccccagcaacggatggcacctggaccaacttggcccatctctccctgccttctgaggagctggcatcctgggagcctttggtctgccacactgggcctggggctgagggtcacagcaggagtacacagcccatgcatctgtcaggagaggcttctacagccaggacctgcccccaggagcctctcagggggacaccgggtggg

SEQ ID NO: 5609 - DNA, 207 bp, Homo Sapiens
actaggggctcgtctacaggagctcacattagcccccagtttccagcttcaggtgtgaaccagacccccgtggtagactgccgcaaggtgtgtggcctgaatgtctctgaccgctgtgacttcatccggaccaaccctgactgccacagtgatggggggtacctggactacctggaaggcatcttctgccacttccctcccagcctc

SEQ ID NO: 5610 - DNA, 612 bp, Homo Sapiens
aggaagagacggttccccttcattggtgaggatgacaatgacgatggtcacccacttcatccatctctgaatattccttatggcatacggaatttaccacctcctctttattatcgcccagtgaatacagtccccagttaccctgggaatacttacactgacacagggttaccttcgtatccctggattctaacttctcctggattcccctatgtctatcacatccgtggttttcccttagctactcagttgaatgttcctcctctccctcctaggggtttcccgtttgtccctccttcaaggtttttttcagcagctgcagcacccgctgccccacctattgcagctgagcctgctgcagctgcacctcttacagccacacctgtagcagctgagcctgctgcaggggcccctgttgcagctgagcctgctgcagaggcacctgttggagctgagcctgctgcagaggcacctgttgcagctgagcctgctgcagaggcacctgttggagtggagccagctgcagaggaaccttcaccagctgagcctgctacagccaagcctgctgccccagaacctcacccttctccctctcttgaacaggcaaatcag

SEQ ID NO: 5611 - DNA, 1911 bp, Homo Sapiens
tacagcgtctccctacgcaaggcggagcgacttcgcgcggagctgctggacctgaaagctggcggcttctccatccgcaatcagaagggagagcaggtcttccgcctggccttccgctccggcgcgctggaccttgactcctgcagccgcgatggcgccctgctgggctgctcgctcacggccgacgggctgccgctgcacttcttcatccagactgtgcggcccaaggacacggtcatgtgctaccgcgtgcgctgggaggaggcagcgccgggccgggccgtggagcacgccatgttcttgggcgacgcggcggcccactggtatggtggcgccgagatgaggacgcaacactggcccatccgcctggatggccagcaggagccccagccgttcgtcaccagcgatgtctactcctccgacgccgcgtttgggggcatcctcgagcgctactggctatcttcgcgcgcggccgccatcaaagtcaatgactcagtgcccttccacctgggctggaacagcacggagcgctcgctgcggcttcaggcgcgctaccacgacacgccctacaagccacccgccggccgcgccgcagcgccagagctgagctaccgagtgtgcgtgggctcagacgtcacctccatccacaagtacatggtgcgtcgctacttcaacaagccgtcaagggtgccagcacccgaggccttccgagaccccatttggtccacatgggcgctgtacgggcgcgccgtggaccaggacaaggtgctgcgttttgcccaacagatccgcctgcaccacttcaacagcagccacctggaaatcgacgacatgtacacacctgcttatggcgacttcgacttcgatgaggtcaaattccccaacgccagcgacatgttccgccgcctgcgcgacgccggcttccgcgtcacgctctgggtgcacccttttgtcaactacaactcgtcgcgcttcggcgagggcgtggagcgcgagctgttcgtgcgcgaacccacgggccggttacctgcgctggtgcgctggtggaacggcatcggcgcggtgctagacttcacgcacccaaaggcccgcgactggttccagggacacctgcggcggctgcgctctcgctactccgtggcttccttcaagttcgacgcgggcgaggtcagctacctgccgcgggacttcagcacctaccggccgctgccggaccccagcgtctggagccggcgctacactgagatggcgctgcccttcttctcgctggcggaggtgcgcgtaggctaccagtcacagaacatctcctgcttcttccgcctggtggatcgcgactctgtgtggggctacgacctggggttgcgctcactcatccccgcggtgctcaccgtcagcatgctgggctacccattcatcctacccgatatggtgggcggcaacgccgtgccccagcggacagccggcggcgatgtgcccgagcgcgagctctacattcgctggctggaagtggccgcctttatgccggccatgcagttctctatcccgccctggcgctacgacgcggaagtggtggccatcgcgcagaagttcgccgccctgcgggcctcgcttgtggcaccgctgttgcttgagctggcgggcgaggtcaccgacacgggtgaccctatcgtgcgccccctttggtggattgcgcccggcgacgagacagctcaccgtatcgactcgcagttccttattggggacacgctgcttgtggccccggtgctggagccaggcaagcaggagcgcgacgtctatttgcccgccggcaagtggcgcagctacaagggtgagcttttcgacaagacgccggtgctgctcaccgattacccggtcgacctggatgagatcgcctactttacctgggcgtcc

SEQ ID NO: 5612 - DNA, 603 bp, Homo Sapiens
tctcccagtattcgccagaagaaactaatgcacaagctgcaggaggaaaaggcttttcgcgaagagatgaaaatttttcgtgaaaaaatagaggacttcagggaagagatgtggactttccgaggcaagatccatgctttccggggccagatcctgggtttttgggaagaggagagacctttctgggaagaggagaaaaccttctggaaagaggaaaaatccttctgggaaatggaaaagtctttcagggaggaagagaaaactttctggaaaaagtaccgcactttctggaaggaggataaggccttctggaaagaggacaatgccttatgggaaagagaccggaaccttcttcaggaggacaaggccctgtgggaggaagaaaaggccctgtgggtagaggaaagagccctccttgagggggagaaagccctgtgggaagataaaacgtccctctgggaggaagagaatgccctctgggaggaagagagggccttctggatggagaacaatggccacgttgccggagagcagatgctcgaagatgggccccacaacgccaacagagggcagcgcttgctggccttctcccgaggcagggcg

SEQ ID NO: 5613 - DNA, 1776 bp, Homo Sapiens
aaagtttacttgggactattctctggcagctccccgaatcctttctccgaagatgtcaaacggcccccagcgcccctggtaactgacaaggaggccaggaagaaggttctcaaacaagctttttcagccaaccaagtgccggagaagctggatgtggtggtaattggcagtggctttgggggcctggctgcagctgcaattctagctaaagctggcaagcgagtcctggtgctggaacaacataccaaggcagggggctgctgtcatacctttggaaagaatggccctgaatttgacacaggaatccattacattgggcgtatggaagagggcagcattggccgttttatcttggaccagatcactgaagggcagctggactgggctcccctgtcctctccttttgacatcatggtactggaagggcccaatggccgaaaggagtaccccatgtacagtggagagaaagcctacattcagggcctcaaggagaagtttccacaggaggaagctatcattgacaagtatataaagctggttaaggtggtatccagtggagcccctcatgccatcctgttgaaattcctcccattgcccgtggttcagctcctcgacaggtgtgggctgctgactcgtttctctccattccttcaagcatccacccagagcctggctgaggtcctgcagcagctgggggcctcctctgagctccaggcagtactcagctacatcttccccacttacggtgtcacccccaaccacagtgccttttccatgcacgccctgctggtcaaccactacatgaaaggaggcttttatccccgagggggttccagtgaaattgccttccacaccatccctgtgattcagcgggctgggggcgctgtcctcacaaaggccactgtgcagagtgtgttgctggactcagctgggaaagcctgtggtgtcagtgtgaagaaggggcatgagctggtgaacatctattgccccatcgtggtctccaacgcaggactgttcaacacctatgaacacctactgccggggaacgcccgctgcctgccaggtgtgaagcagcaactggggacggtgcggcccggcttaggcatgacctctgttttcatctgcctgcgaggcaccagggaagacctgcatctgccgtccaccaactactatgtttactatgacacggacatggaccaggcgatggagcgctacgtctccatgcccagggaagaggctgcggaacacatccctcttctcttcttcgctttcccatcagccaaagatccgacctgggaggaccgattcccaggccggtccaccatgatcatgctcatacccactgcctacgagtggtttgaggagtggcaggcggagctgaagggaaagcggggcagtgactatgagaccttcaaaaactcctttgtggaagcctctatgtcagtggtcctgaaactgttcccacagctggaggggaaggtggagagtgtgactgcaggatccccactcaccaaccagttctatctggctgctccccgaggtgcctgctacggggctgaccatgacctgggccgcctgcacccttgtgtgatggcctccttgagggcccagagccccatccccaacctctatctgacaggccaggatatcttcacctgtggactggtcggggccctgcaaggtgccctgctgtgcagcagcgccatcctgaagcggaacttgtactcagaccttaagaatcttgattctaggatccgggcacagaagaaaaagaat

SEQ ID NO: 5614 - DNA, 1677 bp, Homo Sapiens
cagccctcttcctccccatcaggggcagtgcccacgtctttggagctgcagcgagggacggatggcggaaccctccagtccccttcagaggcgactgcaactcgcccggccgtgcctggactccctacagtggtccctactctcgtgactccctcggcccctgggaataggactgtggacctcttcccagtcttaccgatctgtgtctgtgacttgactcctggagcctgcgatataaattgctgctgcgacagggactgctatcttctccatccgaggacagttttctccttctgccttccaggcagcgtaaggtcttcaagctgggtttgtgtagacaactctgttatcttcaggagtaattccccgtttccttcaagagttttcatggattctaatggaatcaggcagttttgtgtccatgtgaacaactcaaacttaaactatttccagaagcttcaaaaggtcaatgcaaccaacttccaggccctggctgcagagtttggaggcgaatcattcacttcaacattccaaactcaatcaccaccatctttttacagggctggggaccccattcttacttacttccccaagtggtctgtaataagcttgctgagacaacctgcaggagttggagctgggggactctgtgctgaaagcaatcctgcaggtttcctagagagtaaaagtacaacttgcactcgttttttcaagaacctggctagtagctgtaccttggattcagccctcaatgctgcctcttactataacttcacagtcttaaaggttccaagaagcatgactgatccacagaatatggagttccaggttcctgtaatacttacctcacaggctaatgctcctctgttggctggaaacacttgtcagaatgtagtttctcaggtcacctatgagatagagaccaatgggacttttggaatccagaaagtttctgtcagtttgggacaaaccaacctgactgttgagccaggcgcttccttacagcaacacttcatccttcgcttcagggcttttcaacagagcacagctgcttctctcaccagtcctagaagtgggaatcctggctatatagttgggaagccactcttggctctgactgatgatataagttactcaatgaccctcttacagagccagggtaatggaagttgctctgttaaaagacatgaagtgcagtttggagtgaatgcaatatctggatgcaagctcaggttgaagaaggcagactgcagccacttgcagcaggagatttatcagactcttcatggaaggcccagaccagagtatgttgccatctttggtaatgctgacccagcccagaaaggagggtggaccaggatcctcaacaggcactgcagcatttcagctataaactgtacttcctgctgtctcataccagtttccctggagatccaggtattgtgggcatatgtaggtctcctgtccaacccgcaagctcatgtatcaggagttcgattcctataccagtgccagtctatacaggattctcagcaagttacagaagtatctttgacaactcttgtgaactttgtggacattacccagaagccacagcctccaaggggccaacccaaaatggactggaaatggccattcgacttctttcccttcaaagtggcattcagcagaggagta

SEQ ID NO: 5615 - DNA, 1383 bp, Homo Sapiens
gccaaaatcctgacaatatctacactgggtggaagccattacctactgttggaccgggtgtctcagattcttcaagagcatggtcataatgtgactatgcttcatcagagtggaaagtttttgatcccagatattaaagaggaggaaaaatcataccaagttatcaggtggttttcacctgaagatcatcaaaaaagaattaagaagcattttgatagctacatagaaacagcattggatggcagaaaagaatctgaagcccttgtaaagctaatggaaatatttgggactcaatgtagttatttgctaagcagaaaggatataatggattccttaaagaatgagaactatgatctggtatttgttgaagcatttgatttctgttctttcctgattgctgagaagcttgtgaaaccatttgtggccattcttcccaccacattcggctctttggattttgggctaccaagccccttgtcttatgttccagtattcccttccttgctgactgatcacatggacttctggggccgagtgaagaattttctgatgttctttagtttctccaggagccaatgggacatgcagtctacatttgacaacaccatcaaggagcatttcccagaaggctctaggccagttttgtctcatcttctactgaaagcagagttgtggtttgttaactctgattttgcctttgattttgcccggcccctgcttcccaacactgtttatattggaggcttgatggaaaaacctattaaaccagtaccacaagacttggacaacttcattgccaactttggggatgcagggtttgtccttgtggcctttggctccatgttgaacacccatcagtcccaggaagtcctcaagaagatgcacaatgcctttgcccacctccctcaaggagtgatatggacatgtcagagttctcattggcccagagatgttcatttggccacaaatgtgaaaattgtggactggcttcctcagagtgacctcctggctcaccccagcatccgtctttttgtcactcatggtgggcagaacagcgtaatggaggccatccgtcatggtgtgcccatggtgggattaccagtcaatggagaccagcatggaaacatggtccgagtagtagccaaaaattatggtgtctctatccggttgaatcaggtcacagccgacacactgacacttacaatgaaacaagtcatagaagacaagaggtacaagtcggcagtggtggcagccagtgtcatcctgcactctcagcccctgagccccgcacagcggctggtgggctggatcgaccacatcctccagactgggggagcgacgcacctcaagccctatgccttccagcagccttggcatgagcag

SEQ ID NO: 5616 - DNA, 201 bp, Homo Sapiens
atgggggcacaggtgaggctgccgcccggagagccctgccgagaaggatatgtgctgtctctggtctgtccaaactcctcccaggcttggtgtgagatcacaaatgtgtcacagctgctggcttctcctgtgctctacacggacctgaattacagcataaacaacttgagcatttcagcaaatgtagaaaacaaatacagt

SEQ ID NO: 5617 - DNA, 1104 bp, Homo Sapiens
ggtgactgccaacagccagcccaatgtcgaatccagaaatgcaccacggacttcgtgtccctgacttctcacctgaactctgccgttgacggctttgactctgagttttgcaaggccttgcgtgcctatgctggctgcacccagcgaacttcaaaagcctgccgtggcaacctggtataccattctgccgtgttgggtatcagtgacctcatgagccagaggaattgttccaaggatggacccacatcctctaccaaccccgaagtgacccatgatccttgcaactatcacagccacgctggagccagggaacacaggagaggggaccagaaccctcccagttaccttttttgtggcttgtttggagatcctcacctcagaactttcaaggataacttccaaacatgcaaagtagaaggggcctggccactcatagataataattatctttcagttcaagtgacaaacgtacctgtggtccctggatccagtgctactgctacaaataagatcactattatcttcaaagcccaccatgggtgtacagatcagaaagtctaccaagctgtgacagatgacctgccggccgcctttgtggatggcaccaccagtggtggggacagcgatgccaagagcctgcgtatcgtggaaagggagagtggccactatgtggagatgcacgcccgctatatagggaccacagtgtttgtgcggcaggtgggtcgctacctgacccttgccatccgtatgcctgaagacctggccatgtcctacgaggagagccaggacctgcagctgtgcgtgaacggctgccccctgagtgaacgcatcgatgacgggcagggccaggtgtctgccatcctgggacacagcctgcctcgcacctccttggtgcaggcctggcctggctacacactggagactgccaacactcaatgccatgagaagatgccagtgaaggacatctatttccagtcctgtgtcttcgacctgctcaccactggtgatgccaactttactgccgcagcccacagtgccttggaggatgtggaggccctgcacccaaggaaggaacgctggcacattttccccagcagtggcaat

SEQ ID NO: 5618 - DNA, 1149 bp, Homo Sapiens
ttttacactcccatgccagacaacattgaagaaagctggaaaataatggccttggatgccatcgctaaaacttgtacatttacggctatgtgttttgaaaatatgcgtattatgagatatgaagagtttatatccatgatattcaggctggattatacccaaccactttcagatgaatacatcacagtgactgatacaacatttgttgacattccagtacgattgtacttgccaaaaagaaagtcagaaacccgaaggcgagctgtgatatattttcatggtggtggtttttgttttggaagttccaaacagagggcttttgacttcctgaatagatggacggcaaacacgcttgatgctgttgttgtaggcgtggactataggctggctcctcaacaccactttcctgctcagtttgaagatggccttgctgcagtcaaattttttcttttggaaaaaattcttacaaaatatggagtggatcccacccgaatctgcatttcgggagacagttctgggggcaatttagcaacagcggtcactcaacaggtgcagaatgatgctgaaataaaacataaaatcaagatgcaggtcttactttaccctggcttacagataacagattcttatttgccatctcaccgagaaaatgagcatggtatagttttgaccagggatgtagccataaaactcgtgagcttatatttcaccaaggatgaagcacttccctgggcaatgagaagaaaccaacacatgcctctggagtcaagacatctgtttaagtttgttaactggagtattcttcttcctgagaagtatagaaaagactatgtatatactgaaccaattcttggaggacttagttattcattgccaggacttacagacagcagagcattacccttgttggccaatgattctcagttacagaatttgccactaacctatattcttacttgtcaacatgatctcttaagagatgatggacttatgtatgttacaagacttcgaaatgttggagtccaagttgttcatgaacatattgaggatggaattcatggagctttatcattcatgacttcaccattttatttacgtctaggtcttaggataagagatatgtatgtaagttggctggataagaattta

SEQ ID NO: 5619 - DNA, 534 bp, Homo Sapiens
atggcgccggtgggcgggggcgggcgcccggtcggcggaccggcccgcgggcgcctcctcctggcggcgccggtgctgctggtgctgctgtgggcgctgggggcccggggccagggcagcccccagcagggcacgatcgtgggcatgaggctggcgagctgcaacaagtcgtgtgggacgaacccggatggcatcatcttcgtgtccgagggcagcaccgtgaacctgaggctgtacggctacagcctgggcaacatctccagcaacctgatctccttcaccgaggtggacgatgccgagaccctccacaagtccaccagctgcctcgagctcaccaaggacctggtcgtccagcagctggtcaacgtgagccgcaggaacacgtccggcgtgctggtggtgctcaccaagttcctccggaggagcgagagcatgaagctgtatgcactgtgcacccgggcccagcccgacgggccctggctgaagtggacggacaaggactcactgctcttcatggtggaggagcctgggagg

SEQ ID NO: 5620 - DNA, 915 bp, Homo Sapiens
tccccgcctgctggtctgctgagcctgctcacctctggccagggcgctctggatcaagaggctctgggcggcctgttaaatacgctggcggaccgtgtgcactgcaccaacgggccgtgtggaaagtgcctgtctgtggaggacgccctgggcctgggcgagcctgaggggtcagggctgcccccgggcccggtcctggaggccaggtacgtcgcccgcctcagtgccgccgccgtcctgtacctcagcaaccccgagggcacctgtgaggacactcgggctggcctctgggcctctcatgcagaccacctcctggccctgctcgagagccccaaggccctgaccccgggcctgagctggctgctgcagaggatgcaggcccgggctgccggccagacccccaagacggcctgcgtagatatccctcagctgctggaggaggcggtgggggcgggggctccgggcagtgctggcggcgtcctggctgccctgctggaccatgtcaggagcgggtcttgcttccacgccttgccgagccctcagtacttcgtggactttgtgttccagcagcacagcagcgaggtccctatgacgctggccgagctgtcagccttgatgcagcgcctgggggtgggcagggaggcccacagtgaccacagtcatcggcacaggggagccagcagccgggaccctgtgcccctcatcagctccagcaacagctccagtgtgtgggacacggtatgcctgagtgccagggacgtgatggctgcatatggactgtcggaacaggctggggtgaccccggaggcctgggcccaactgagccctgccctgctccaacagcagctgagtggagcctgcacctcccagtccaggccccccgtccaggaccagctcagccagtcagagaggtat

SEQ ID NO: 5621 - DNA, 969 bp, Homo Sapiens
gaactcagccgctccgacctcagcctcatccaacagcagcagcagcagcagcagcagcaacaacaacaacaacagcaaaagcagctggaggaggctgaggaggagaggacagaggtgcctggggcaacctccaccttgacggttccagtgtctgtatttatgttgaaagtccaggtgaatgacatcatcagtcgtcagtacctgagccaagcagttgtagaagtgtttgtaaactacacgaagacaaattccacagtaactaaaagcaatggagcagtgctgataaaagtaccctacaaattaggacttagtttaactattattgcttacaaagatggctacgtgttgacccctctgccttggaaaaccagaagaatgccaatatattcatcagttacactttcactgttcccgcaaagccaagcaaatatatggctatttgaagacactgttttaattactggaaaattagctgatgccaagtctcaaccaagtgttcagttttcaaaagccttaattaaacttcctgacaaccatcatattagcaacgttactggctatcttacagttctacaacagtttttgaaagtggacaattttctgcatacaactggaattactctcaataaaccaggttttgaaaacattgaattgactcctcttgctgcaatatgtgtgaaaatatattctggaggaaaagaactaaaggtcaatggctctattcaagtttctcttcctcttctacgtctgaatgatataagtgcaggggatcgcatacctgcttggacatttgatatgaacacaggtgcttggataaatcatggtcggggaatggtcaaggaacataacaatcatttaatctggacatatgatgcaccacatttggggtactggatagcagctccacttccaggaactagaggttcaggtataaatgaagattccaaggacataactgcctaccacaca

SEQ ID NO: 5622 - DNA, 159 bp, Homo Sapiens
aattatgaggaattagaaaactcaggagatacaactgtggaatctgaaagaccaaataaagtgactattccaagcacatttgctgcagtgaccatcaaagaaacattaaatgcaaatataaattctaccaactttgctccggatgaaaatcagttagag

SEQ ID NO: 5623 - DNA, 177 bp, Homo Sapiens
gaccaggtggactggagtagactgtacagagacactggtctggtgaagatgtccaggaaaccacgagcctccagcccattttccaacaaccacccatcaacaccaaagaggttcccaagacaacccagaagggaaaagggacccgtcaaggaagttccaggaacaaaaggctctccc

SEQ ID NO: 5624 - DNA, 453 bp, Homo Sapiens
ggctctgctcagggccctcccaagccaaggctgcagacgctgcgaatgaccctcccgagcccccacatgccccggcccaaccaaaccatcctggtggacgtggcccggaacgcggcgaccatcacagtgaccccacctcagagcaaccacagctgggcggtgctgttcgacgggcagagcggctgcatctgttaccgccctgaggagcaccaggtctgcttcctccgcctgatggaggacagtgatcgggagaccctgcggctgctggtggatacctccaaggtccaagaggcttgggtccccagccaggacacccaccacacccaggagctgctggcagtgcaggggagcctcgaagtggaccccgcccaggcgggggctttggtgcagcgcctgtgcatgaggacccccatctactgggcccggcgagcagaggggccccggagacagcgg

SEQ ID NO: 5625 - DNA, 1029 bp, Homo Sapiens
cggaaaggcttctgggactacttcagccagaccagcggggacaaaggcagggtggagcagatccatcagcagaagatggctcgcgagcccgcgaccctgaaagacagccttgagcaagacctcaacaatatgaacaagttcctggaaaagctgaggcctctgagtgggagcgaggctcctcggctcccacaggacccggtgggcatgcggcggcagctgcaggaggagttggaggaggtgaaggctcgcctccagccctacatggcagaggcgcacgagctggtgggctggaatttggagggcttgcggcagcaactgaagccctacacgatggatctgatggagcaggtggccctgcgcgtgcaggagctgcaggagcagttgcgcgtggtgggggaagacaccaaggcccagttgctggggggcgtggacgaggcttgggctttgctgcagggactgcagagccgcgtggtgcaccacaccggccgcttcaaagagctcttccacccatacgccgagagcctggtgagcggcatcgggcgccacgtgcaggagctgcaccgcagtgtggctccgcacgcccccgccagccccgcgcgcctcagtcgctgcgtgcaggtgctctcccggaagctcacgctcaaggccaaggccctgcacgcacgcatccagcagaacctggaccagctgcgcgaagagctcagcagagcctttgcaggcactgggactgaggaaggggccggcccggacccccagatgctctccgaggaggtgcgccagcgacttcaggctttccgccaggacacctacctgcagatagctgccttcactcgcgccatcgaccaggagactgaggaggtccagcagcagctggcgccacctccaccaggccacagtgccttcgccccagagtttcaacaaacagacagtggcaaggttctgagcaagctgcaggcccgtctggatgacctgtgggaagacatcactcacagccttcatgaccagggccacagccatctgggggacccc

SEQ ID NO: 5626 - DNA, 1614 bp, Homo Sapiens
atggcggggcccccggccctacccccgccggagacggcggcggccgccaccacggcggccgccgcctcgtcgtccgccgcttccccgcactaccaagagtggatcctggacaccatcgactcgctgcgctcgcgcaaggcgcggccggacctggagcgcatctgccggatggtgcggcggcggcacggcccggagccggagcgcacgcgcgccgagctcgagaaactgatccagcagcgcgccgtgctccgggtcagctacaaggggagcatctcgtaccgcaacgcggcgcgcgtccagccgccccggcgcggagccaccccgccggccccgccgcgcgccccccgcggggcccccgccgccgccgccgccgccgcgccgccgcccacgcccgccccgccgccaccgcccgcgcccgtcgccgccgccgccccggcccgggcgccccgcgcggccgccgccgccgccacagcgcccccctcgcctggccccgcgcagccgggcccccgcgcgcagcgggccgcgcccctggccgcgccgccgcccgcgccagccgctcccccggcggtggcgcccccggccggcccgcgccgcgcccccccgcccgccgtcgccgcccgggagccgccgctgccgccgccgccacagccgccggcgccgccacagcagcagcagccgccgccgccgcagccacagccgccgccggaggggggcgcggtgcgggccggcggcgcggcgcggcccgtgagcctgcgggaagtcgtgcgctacctcgggggcagcggcggcgccggcggtcgcctaacccgcggccgcgtgcaggggctgctggaggaggaggcggcggctcgaggccgtctggagcgcacccgtctcggagcgcttgcgctgccccgcggggacaggcccggacgggcgccgccggccgccagcgcccgcccgtctcgcagcaagagaggtggagaagagcgagtacttgagaaagaagaggaagaagatgatgatgaagatgaagatgaagaagatgatgtgtcagagggctctgaagtgcccgagagtgaccgtcctgcaggtgcccagcaccaccagcttaacggcgagcggggacctcagagtgccaaggagagggtcaaggagtggaccccctgcggaccgcaccagggccaggatgaagggcgggggccagccccgggcagcggcacccgccaggtgttctccatggcagccatgaacaaggaagggggaacagcttctgttgccaccgggccagactccccgtcccccgtgcctttgcccccaggcaaaccagccctacctggggccgacgggaccccctttggctgtccgcccgggcgcaaagagaagccatctgatcccgtcgagtggaccgtgatggatgtcgtcgaatattttactgaggctggattcccggagcaggcgacagctttccaagagcaggaaattgatggcaaatctttgctgctcatgcagcgcacagatgtgctcaccggcctgtccatccgcctcgggccagccctgaaaatctacgagcaccacatcaaggtgcttcagcaaggccactttgaggatgatgaccccgatggcttcttaggc

SEQ ID NO: 5627 - DNA, 756 bp, Homo Sapiens
cgtccacctcccttcctcttctgcccattgagcagtcaaagaactgaaagtccttataagcctgtgcacctgggcctgggccctacagataaggtagctgctattgctatggcccgcatcattgacctggtgccctgggacgatggctccacacatgtgtatgcctccccggccatcctgcttcccatggagcggcagcgcaaccagctggcgggcgtgaagcagcagctctaccacccagccctgcccaccctgcgccacatggacagggacaccgtcaaggcctgccttcctgatgagcactgccagtccaccacctactgccgcaaagatgaatttgacaacgcccattttacactccttggggtccccaacaaacccctgcagtgtttggacatcaccgccacaggccagaagcttcgcaacaggtaccacgagggaaagctggcgcccatcgcgccaggcatcaaccgagtggactggccctgcttcacgcgcgccatcgaggactggtcccacttcgtgtcctcggccggggagttcaagctgccttgcctgaggaagcgagcggagggtctcagcggctacgcggtgcggtacttgaagcccgacgtgacccagacctggcggtactgcctcaaccagaaccccagcctggaccgctacggacagaagcccctgcctttcgactccctgaacactttccgaagcttcggctccagctacagtcgtgtcaactacctgaccccctggcat

SEQ ID NO: 5628 - DNA, 177 bp, Homo Sapiens
acaggaccgggtatgactttgcaactgaagctgaaggagtcttttctgacaaattcctcctatgagtccagcttcctggaattgcttgaaaagctctgcctcctcctccatctcccttcagggaccagcgtcaccctccaccatgcaagatctcaacaccatgttgtctgcaacaca

SEQ ID NO: 5629 - DNA, 993 bp, Homo Sapiens
tatccgagcataactgtgacacctgatgaagagcaaaacttgaatcattatatacaagttttagagaacctagtacgaagtgttccctctggggagccaggtcgtgagaaaaaatctaactctccaaaacatgtttattctatagcatcaaagggatcaaaatttaaggagctagttacacatggagacgcttcaactgagaatgatgttttaaccaatcctatcagtgaagaaactacaactttccctacaggaggcttcacaccggaaataggaaagaaaaaacacacggaaagtaccccattctggtcgatcaaaccaaacaatgtttccattgttttgcatgcagaggaaccttatattgaaaatgaagagccagagccagagccggagccagctgcaaaacaaactgaggcaccaagaatgttgccagttgttactgaatcatctacaagtccatatgttacctcatacaagtcacctgtcaccactttagataagagcactggcattgggatctctacagaatcagaagatgttcctcagctctcaggtgaaactgcgatagaaaaacccgaagagtttggaaagcacccagagagttggaataatgatgacattttgaaaaaaattttagatattaattcacaagtgcaacaggcacttcttagtgacaccagcaacccagcatatagagaagatattgaagcctctaaagatcacctaaaacgaagccttgctctagcagcagcagcagaacataaattaaaaacaatgtataagtcccagttattgccagtaggacgaacaagtaataaaattgatgacatcgaaactgttattaacatgctgtgtaattctagatctaaactctatgaatatttagatattaaatgtgttccaccagagatgagagaaaaagctgctacagtattcaatacattaaaaaatatgtgtagatcaaggagagtcacagccttattaaaagtttat

SEQ ID NO: 5630 - DNA, 468 bp, Homo Sapiens
tctatgtgccacaggtggagcagggctgtgctcttccctgccgcccaccggccaaagaggtcctcatcactgccattgaacccagtcctgcagacctccctggaggaggtggagctgctctacgagttcctgctggccgaacttgagatcagccctgacctgcagatctccatcaaggacgaggagctggcctccttgcggaaggcctcagacttccgcaccgtctgcaacaacgtcatccccaagagcatcccagacatccgccggctcagcgccagcctctccagccaccctggcatcctcaagaaagaagactttgaaaggacagtgctgaccctggcctacacagcctaccgcacagccctgtcccacggccatcagaaggacatctgggcgcagtccctcgttagcctcttccaggccctgaggcacgacttgatgcgctcctcacagccgggagtacctccc

SEQ ID NO: 5631 - DNA, 1392 bp, Homo Sapiens
gggagggcctctctccagcatggacaggcggctgagaaggggccacatcgcagccgcgacaccgccgagccatccttccctgagatacccctggatggtaccctggcccctccagagtcccagggcaatgggtccactctgcagcccaatgtggtgtacattaccctacgctccaagcgcagcaagccggccaatatccgtggcactgtgaagcccaagcgcaggaaaaagcatgcagtggcatcggctgccccagggcaggaggctttggtcggaccatcccttcagccgcaggaagcggcaagggaagctgatgctgtagcacctgggtacgctcagggagcaaacctggttaagattggagagcgaccctggaggttggtgcggggtccgggagtgcgagccgggggcccagacttcctgcagcccagctccagggagagcaacattaggatctacagcgagagcgccccctcctggctgagcaaagatgacatccgaagaatgcgactcttggcggacagcgcagtggcagggctccggcctgtgtcctctaggagcggagcccgtttgctggtgctggaggggggcgcacctggcgctgtgctccgctgtggccctagcccctgtgggcttctcaagcagcccttggacatgagtgaggtgtttgccttccacctagacaggatcctggggctcaacaggaccctgccgtctgtgagcaggaaagcagagttcatccaagatggccgcccatgccccatcattctttgggatgcatctttatcttcagcaagtaatgacacccattcttctgttaagctcacctggggaacttatcagcagttgctgaaacagaaatgctggcagaatggccgagtacccaagcctgaatcaggttgtactgaaatacatcatcatgagtggtccaagatggcactctttgattttttgttacagatttataatcgcttagatacaaattgctgtggattcagacctcgcaaggaagatgcctgtgtacagaatggattgaggccaaaatgtgatgaccaaggttctgcggctctcgcacacattatccagcgaaagcatgacccaaggcatttggtttttatagacaacaagggtttctttgacaggagtgaagataacttaaacttcaaattgttagaaggcatcaaagagtttccagcttctgcagtttctgttttgaagagccagcacttacggcagaaacttcttcagtctctgtttcttgataaagtgtattgggaaagtcaaggaggtagacaaggaattgaaaagcttatcgatgtaatagaacacagagccaaaattcttatcacctatatcaatgcacacggggtcaaagtattacctatgaatgaa

SEQ ID NO: 5632 - DNA, 714 bp, Homo Sapiens
ctgcctacatcagctcctttgtctgtttctcttccgacaaacattgtaccaccgaccaccatctggactagctctccacaaaacactgatgcagacactgcctccccatccaacggcactcacaacaactcggtgctcccagttacagcatcagccccaacatctctgcttcctaagaacatttccatagagtccagagaagaggagatcaccagcccaggttcgaattgggaaggcacaaacacagacccctcaccttctgggttctcgtcaacaagcggtggagtccacttaacaaccacgttgaaggaacacagctcgggcactcctgaagcaggcgtggcagctacactgtcgcagtccgctgctgagcctcccacactcatctcccctcaagctccagcctcatcaccctcatccctatcaacctcaccacctgaggtcttttctgcctccgttactaccaaccatagctccactgtgaccagcacccaacccactggagctccaactgcaccagagtccccgacagaggagtccagctctgaccacacacccacttcacatgccacagctgagccagtaccccaggagaaaacacccccaacaactgtgtcaggcaaagtgatgtgtgagctcatagacatggagaccaccaccacctttcccagggtgatcatgcaggaagtagaacatgcattaagttcaggcagc

SEQ ID NO: 5633 - DNA, 231 bp, Homo Sapiens
agcggcgagtactgccacggctggctggacgcgcagggcgtctggcgcatcggcttccagtgtcccgagcgcttcgacggcggcgacgccaccatctgctgcggcagctgcgcgttgcgctactgctgctccagcgccgaggcgcgcctggaccagggcggctgcgacaatgaccgccagcagggcgctggcgagcctggccgggcggacaaagacggccccgacggctcg

SEQ ID NO: 5634 - DNA, 789 bp, Homo Sapiens
gtggagcacgaggaggtggcgcagcgtgtgatcaaactgcaccgcgggcgaggggtggctgccatgcagagccggcagtgggtccgggacagctgcaggaagctctcagggcttctccgccagaagaatgcagttctgaacaaactgaaaactgcaattggagcagtggagaaagacgtgggcctgtcggatgaagagaaactgtttcaggtgcacacgtttgaaattttccagaaagagctgaatgaaagtgaaaattccgttttccaagctgtctacggactgcagagagccctgcagggggattacaaagatgtcgtgaacatgaaggagagcagccggcagcgcctggaggccctgagagaggctgcaataaaggaagaaacagaatatatggaacttctggcagcagaaaaacatcaagttgaagcccttaaaaatatgcaacatcaaaaccaaagtttatccatgcttgacgagattcttgaagatgtaagaaaggcagcggatcgtctggaggaagagatagaggaacatgcttttgacgacaataaatcagtcaagggggtcaattttgaggcagttctgagggtggaggaagaagaggccaattctaagcaaaatataacaaaacgagaagtggaggatgacttgggtcttagcatgctgattgactcccagaacaaccagtatattttgaccaagcccagagattcaaccatcccacgtgcagatcaccactttataaaggacattgttaccataggaatgctgtccttgccttgtggc

SEQ ID NO: 5635 - DNA, 336 bp, Homo Sapiens
ggtaaaggagctcgaggctttgggaggggagccctgatccgcctgaatatctggccggcggtccaaggggcctgcaaacagctggaggtctgtgagcactgcgtggagggagacagagcgcgcaatctctccagctgcatgtgggagcagtgccggccagaggagccaggacactgtgtggcccaatctgaggtggtcaaggaaggttgctccatctacaaccgctcagaggcatgtccagctgctcaccaccaccccacctatgaaccgaagacagtcacaacagggagccccccagtccctgaggcccacagccctggatttgacggggccagc

SEQ ID NO: 5636 - DNA, 570 bp, Homo Sapiens
tccaaaatcccatccatcactgacccacactttatagacaactgcatagaagcccacaacgaatggcgtggcaaagtcaaccctcccgcggccgacatgaaatacatgatttgggataaaggtttagcaaagatggctaaagcatgggcaaaccagtgcaaatttgaacataatgactgtttggataaatcatataaatgctatgcagcttttgaatatgttggagaaaatatctggttaggtggaataaagtcattcacaccaagacatgccattacggcttggtataatgaaacccaattttatgattttgatagtctatcatgctccagagtctgtggccattatacacagttagtttgggccaattcattttatgtcggttgtgcagttgcaatgtgtcctaaccttgggggagcttcaactgcaatatttgtatgcaactacggacctgcaggaaattttgcaaatatgcctccttacgtaagaggagaatcttgctctctctgctcaaaagaagagaaatgtgtaaagaacctctgcaaaaatccatttctgaagccaacgggg

SEQ ID NO: 5637 - DNA, 1557 bp, Homo Sapiens
cggaaggggtccccagaagaggcctccttctactatggaaccttccctcttggcttctcctggggcgtgggcagttctgcctaccagacggagggcgcctgggaccaggacgggaaagggcctagcatctgggacgtcttcacacacagtgggaaggggaaagtgcttgggaatgagacggcagatgtagcctgtgacggctactacaaggtccaggaggacatcattctgctgagggaactgcacgtcaaccactaccgattctccctgtcttggccccggctcctgcccacaggcatccgagccgagcaggtgaacaagaagggaatcgaattctacagtgatcttatcgatgcccttctgagcagcaacatcactcccatcgtgaccttgcaccactgggatctgccacagctgctccaggtcaaatacggtgggtggcagaatgtgagcatggccaactacttcagagactacgccaacctgtgctttgaggcctttggggaccgtgtgaagcactggatcacgttcagtgatcctcgggcaatggcagaaaaaggctatgagacgggccaccatgcgccgggcctgaagctccgcggcaccggcctgtacaaggcagcacaccacatcattaaggcccacgccaaagcctggcattcttataacaccacgtggcgcagcaagcagcaaggtctggtgggaatttcattgaactgtgactggggggaacctgtggacattagtaaccccaaggacctagaggctgccgagagatacctacagttctgtctgggctggtttgccaaccccatttatgccggtgactacccccaagtcatgaaggactacattggaagaaagagtgcagagcaaggcctggagatgtcgaggttaccggtgttctcactccaggagaagagctacattaaaggcacatccgatttcttgggattaggtcattttactactcggtacatcacggaaaggaactacccctcccgccaggggcccagctaccagaacgatcgtgacttgatagagctggttgacccaaactggccagatctggggtctaaatggctatattctgtgccatggggatttaggaggctccttaactttgctcagactcaatacggtgatcctcccatatatgtgatggaaaatggagcatctcaaaaattccactgtactcaattatgtgatgagtggagaattcaataccttaaaggatacataaatgaaatgctaaaagctataaaagatggtgctaatataaaggggtatacttcctggtctctgttggataagtttgaatgggagaaaggatactcagatagatatggattctactatgttgaatttaacgacagaaataagcctcgctatccaaaggcttcagttcaatattacaagaagattatcattgccaatgggtttcccaatccaagagaggtggaaagttggtacctcaaagctttggaaacttgctctatcaacaatcagatgcttgctgcagagcccttgctaagtcacatgcaaatggttacggag

SEQ ID NO: 5638 - DNA, 1404 bp, Homo Sapiens
gggaaagtcctggtgtggccctgtgacatgagccattggcttaatgtcaaggtcattctagaagagctcatagtgagaggccatgaggtaacagtattgactcactcaaagccttcgttaattgactacaggaagccttctgcattgaaatttgaggtggtccatatgccacaggacagaacagaagaaaatgaaatatttgttgacctagctctgaatgtcttgccaggcttatcaacctggcaatcagttataaaattaaatgatttttttgttgaaataagaggaactttaaaaatgatgtgtgagagctttatctacaatcagacacttatgaagaagctacaggaaaccaactacgatgtaatgcttatagaccctgtgattccctgtggagacctgatggctgagttgcttgcagtcccttttgtgctcacacttagaatttctgtaggaggcaatatggagcgaagctgtgggaaacttccagctccactttcctatgtacctgtgcctatgacaggactaacagacagaatgacctttctggaaagagtaaaaaattcaatgctttcagttttgttccacttctggattcaggattacgactatcatttttgggaagagttttatagtaaggcattaggaaggcccactacattatgtgagactgtgggaaaagctgagatatggctaatacgaacatattgggattttgaatttcctcaaccataccaacctaactttgagtttgttggaggattgcactgtaaacctgccaaagctttgcctaaggaaatggaaaattttgtccagagttcaggggaagatggtattgtggtgttttctctggggtcactgtttcaaaatgttacagaagaaaaggctaatatcattgcttcagcccttgcccagatcccacagaaggtgttatggaggtacaaaggaaaaaaaccatccacattaggagccaatactcggctgtatgattggataccccagaatgatcttcttggtcatcccaaaaccaaagcttttatcactcatggtggaatgaatgggatctatgaagctatttaccatggggtccctatggtgggagttcccatatttggtgatcagcttgataacatagctcacatgaaggccaaaggagcagctgtagaaataaacttcaaaactatgacaagcgaagatttactgagggctttgagaacagtcattaccgattcctcttataaagagaatgctatgagattatcaagaattcaccatgatcaacctgtaaagcccctagatcgagcagtcttctggatcgagtttgtcatgcgccacaaaggagccaagcacctgcgatcagctgcccatgacctcacctggttccagcactactctatagatgtg

SEQ ID NO: 5639 - DNA, 171 bp, Homo Sapiens
cagggaggacaggttgactgtggtgagttccaggacaccaaggtctactgcactcgggaatctaacccacactgtggctctgatggccagacatatggcaataaatgtgccttctgtaaggccatagtgaaaagtggtggaaagattagcctaaagcatcctggaaaatgc

SEQ ID NO: 5640 - DNA, 387 bp, Homo Sapiens
aaaatctacactcgttgcaaactggcaaaaatattctcgagggctggcctggacaattactggggcttcagccttggaaactggatctgcatggcatattatgagagcggctacaacaccacagccccgacggtcctggatgacggcagcatcgactatggcatcttccagatcaacagcttcgcgtggtgcagacgcggaaagctgaaggagaacaaccactgccatgtcgcctgctcagccttgatcactgatgacctcacagatgcaattatctgtgccaggaaaattgttaaagagacacaaggaatgaactattggcaaggctggaagaaacattgtgagggcagagacctgtccgagtggaaaaaaggctgtgaggtttcc

SEQ ID NO: 5641 - DNA, 1191 bp, Homo Sapiens
cgccggaagctgctggtgtttctgctggatggttttcgctcagactacatcagtgatgaggcgctggagtcattgcctggtttcaaagagattgtgagcaggggagtaaaagtggattacttgactccagacttccctagtctctcgtatcccaattattataccctaatgactggccgccattgtgaagtccatcagatgatcgggaactacatgtgggaccccaccaccaacaagtcctttgacattggcgtcaacaaagacagcctaatgcctctctggtggaatggatcagaacctctgtgggtcactctgaccaaggccaaaaggaaggtctacatgtactactggccaggctgtgaggttgagattctgggtgtcagacccacctactgcctagaatataaaaatgtcccaacggatatcaattttgccaatgcagtcagcgatgctcttgactccttcaagagtggccgggccgacctggcagccatataccatgagcgcattgacgtggaaggccaccactacgggcctgcatctccgcagaggaaagatgccctcaaggctgtagacactgtcctgaagtacatgaccaagtggatccaggagcggggcctgcaggaccgcctgaacgtcattattttctcggatcacggaatgaccgacattttctggatggacaaagtgattgagctgaataagtacatcagcctgaatgacctgcagcaagtgaaggaccgcgggcctgttgtgagcctttggccggcccctgggaaacactctgagatatataacaaactgagcacagtggaacacatgactgtctacgagaaagaagccatcccaagcaggttctattacaagaaaggaaagtttgtctctcctttgactttagtggctgatgaaggctggttcataactgagaatcgagagatgcttccgttttggatgaacagcaccggcaggcgggaaggttggcagcgtggatggcacggctacgacaacgagctcatggacatgcggggcatcttcctggccttcggacctgatttcaaatccaacttcagagctgctcctatcaggtcggtggacgtctacaatgtcatgtgcaatgtggtgggcatcaccccgctgcccaacaacggatcctggtccagggtgatgtgcatgctgaagggccgcgccagc

SEQ ID NO: 5642 - DNA, 804 bp, Homo Sapiens
caacctttcagcccattagcacctgagccagtgctttctggagctcacacctggcgctcactcatccatcacattaggctgatgtccttgcccattgccaagaagtacatgtcagaaaataagggagttcctctgcatgggggtgatgaagacagaccctttccagactttgacccctggtggacaaacgactgtgagcagaatgagtcagagcccattcctgccaactgcactggctgtgcccagaaacacctgaaggtgatgctcctggaagacgccccaaggaaatttgagaggctccatccactggtgatcaagacgggaaagcccctgttggaggaagagattcagcattttttgtgccagtaccctgaggcgacagaaggcttctctgaagggtttttcgccaagtggtggcgctgctttcctgagcggtggttcccatttccttatccatggaggagacctctgaacagatcacaaatgttacgtgagctttttcctgttttcactcacctgccatttccaaaagatgcctctttaaacaagtgctcctttcttcacccagaacctgttgtggggagtaagatgcataagatgcctgacctatttatcattggcagcggtgaggccatgttgcagctcatccctcccttccagtgccgaagacattgtcagtctgtggccatgccaatagagccaggggatatcggctatgtcgacaccacccactggaaggtctacgttatagccagaggggtccagcctttggtcatctgcgatggaaccgctttctcagaactg

SEQ ID NO: 5643 - DNA, 1236 bp, Homo Sapiens
gcaccggtacaaagtcagggctcccagaacaagctgctcctggtgtccttcgacggcttccgctggaactacgaccaggacgtggacacccccaacctggacgccatggcccgagacggggtgaaggcacgctacatgacccccgcctttgtcaccatgaccagcccctgccacttcaccctggtcaccggcaaatatatcgagaaccacggggtggttcacaacatgtactacaacaccaccagcaaggtgaagctgccctaccacgccacgctgggcatccagaggtggtgggacaacggcagcgtgcccatctggatcacagcccagaggcagggcctgagggctggctccttcttctacccgggcgggaacgtcacctaccaaggggtggctgtgacgcggagccggaaagaaggcatcgcacacaactacaaaaatgagacggagtggagagcgaacatcgacacagtgatggcgtggttcacagaggaggacctggatctggtcacactctacttcggggagccggactccacgggccacaggtacggccccgagtccccggagaggagggagatggtgcggcaggtggaccggaccgtgggctacctccgggagagcatcgcgcgcaaccacctcacagaccgcctcaacctgatcatcacatccgaccacggcatgacgaccgtggacaaacgggctggcgacctggttgaattccacaagttccccaacttcaccttccgggacatcgagtttgagctcctggactacggaccaaacgggatgctgctccctaaagaagggaggctggagaaggtgtacgatgccctcaaggacgcccaccccaagctccacgtctacaagaaggaggcgttccccgaggccttccactacgccaacaaccccagggtcacacccctgctgatgtacagcgaccttggctacgtcatccatgggagaattaacgtccagttcaacaatggggagcacggctttgacaacaaggacatggacatgaagaccatcttccgcgctgtgggccctagcttcagggcgggcctggaggtggagccctttgagagcgtccacgtgtacgagctcatgtgccggctgctgggcatcgtgcccgaggccaacgatgggcacctagctactctgctgcccatgctgcacacagaatctgctcttccgcctgatggaaggcctactctcctgcccaagggaagatct

SEQ ID NO: 5644 - DNA, 492 bp, Homo Sapiens
gaggttctgctgcagcctgacttcaatgctgaaaagttctcaggcctctggtacgtggtctccatggcatctgactgcagggtcttcctgggcaagaaggaccacctgtccatgtccaccagggccatcaggcccacagaggagggcggcctccacgtccacatggagttcccgggggcggacggctgtaaccaggtggatgccgagtacctgaaggtgggctccgagggacacttcagagtcccggccttgggctacctggacgtgcgcatcgtggacacagactacagctccttcgccgtcctttacatctacaaggagctggagggggccctcagcaccatggtgcagctctacagccggacccaggatgtgagtccccaggctctgaagtccttccaggacttctacccgaccctggggctccccaaggacatgatggtcatgctgccccagtcagatgcatgcaaccctgagagcaaggaggcgccc

SEQ ID NO: 5645 - DNA, 1626 bp, Homo Sapiens
actgggcccgaagttgctcagcctgaagtagacaccaccctgggtcgtgtgcgaggccggcaggtgggcgtgaagggcacagaccgccttgtgaatgtctttctgggcattccatttgcccagccgccactgggccctgaccggttctcagccccacacccagcacagccctgggagggtgtgcgggatgccagcactgcgcccccaatgtgcctacaagacgtggagagcatgaacagcagcagatttgtcctcaacggaaaacagcagatcttctccgtttcagaggactgcctggtcctcaacgtctatagcccagctgaggtccccgcagggtccggtaggccggtcatggtatgggtccatggaggcgctctgataactggcgctgccacctcctacgatggatcagctctggctgcctatggggatgtggtcgtggttacagtccagtaccgccttggggtccttggcttcttcagcactggagatgagcatgcacctggcaaccagggcttcctagatgtggtagctgctttgcgctgggtgcaagaaaacatcgcccccttcgggggtgacctcaactgtgtcactgtctttggtggatctgccggtgggagcatcatctctggcctggtcctgtccccagtggctgcagggctgttccacagagccatcacacagagtggggtcatcaccaccccagggatcatcgactctcacccttggcccctagctcagaaaatcgcaaacaccttggcctgcagctccagctccccggctgagatggtgcagtgccttcagcagaaagaaggagaagagctggtccttagcaagaagctgaaaaatactatctatcctctcaccgttgatggcactgtcttccccaaaagccccaaggaactcctgaaggagaagcccttccactctgtgcccttcctcatgggtgtcaacaaccatgagttcagctggctcatccccaggggctggggtctcctggatacaatggagcagatgagccgggaggacatgctggccatctcaacacccgtcttgaccagtctggatgtgccccctgagatgatgcccaccgtcatagatgaatacctaggaagcaactcggacgcacaagccaaatgccaggcgttccaggaattcatgggtgacgtattcatcaatgttcccaccgtcagtttttcaagataccttcgagattctggaagccctgtctttttctatgagttccagcatcgacccagttcttttgcgaagatcaaacctgcctgggtgaaggctgatcatggggccgagggtgcttttgtgttcggaggtcccttcctcatggacgagagctcccgcctggaggccacagaggaggagaagcagctaagcctcaccatgatggcccagtggacccactttgcccggacaggggaccccaatagcaaggctctgcctccttggccccaattcaaccaggcggaacaatatctggagatcaacccagtgccacgggccggacagaagttcagggaggcctggatgcagttctggtcagagacgctccccagcaagatacaacagtggcaccagaagcagaagaacaggaaggcccaggaggacctc

SEQ ID NO: 5646 - DNA, 1542 bp, Homo Sapiens
gagcagaggcggagagcagccaaagcgcccaatgtggtgctggtcgtgagcgactccttcgatggaaggttaacatttcatccaggaagtcaggtagtgaaacttccttttatcaactttatgaagacacgtgggacttcctttctgaatgcctacacaaactctccaatttgttgcccatcacgcgcagcaatgtggagtggcctcttcactcacttaacagaatcttggaataattttaagggtctagatccaaattatacaacatggatggatgtcatggagaggcatggctaccgaacacagaaatttgggaaactggactatacttcaggacatcactccattagtaatcgtgtggaagcgtggacaagagatgttgctttcttactcagacaagaaggcaggcccatggttaatcttatccgtaacaggactaaagtcagagtgatggaaagggattggcagaatacagacaaagcagtaaactggttaagaaaggaagcaattaattacactgaaccatttgttatttacttgggattaaatttaccacacccttacccttcaccatcttctggagaaaattttggatcttcaacatttcacacatctctttattggcttgaaaaagtgtctcatgatgccatcaaaatcccaaagtggtcacctttgtcagaaatgcaccctgtagattattactcttcttatacaaaaaactgcactggaagatttacaaaaaaagaaattaagaatattagagcattttattatgctatgtgtgctgagacagatgccatgcttggtgaaattattttggcccttcatcaattagatcttcttcagaaaactattgtcatatactcctcagaccatggagagctggccatggaacatcgacagttttataaaatgagcatgtacgaggctagtgcacatgttccgcttttgatgatgggaccaggaattaaagccggcctacaagtatcaaatgtggtttctcttgtggatatttaccctaccatgcttgatattgctggaattcctctgcctcagaacctgagtggatactctttgttgccgttatcatcagaaacatttaagaatgaacataaagtcaaaaacctgcatccaccctggattctgagtgaattccatggatgtaatgtgaatgcctccacctacatgcttcgaactaaccactggaaatatatagcctattcggatggtgcatcaatattgcctcaactctttgatctttcctcggatccagatgaattaacaaatgttgctgtaaaatttccagaaattacttattctttggatcagaagcttcattccattataaactaccctaaagtttctgcttctgtccaccagtataataaagagcagtttatcaagtggaaacaaagtataggacagaattattcaaacgttatagcaaatcttaggtggcaccaagactggcagaaggaaccaaggaagtatgaaaatgcaattgatcagtggcttaaaacccatatgaatccaagagcagtt

SEQ ID NO: 5647 - DNA, 756 bp, Homo Sapiens
gcccagatcatcgggggccacgaggtgaccccccactccaggccctacatggcatccgtgcgcttcgggggccaacatcactgcggaggcttcctgctgcgagcccgctgggtggtctcggccgcccactgcttcagccacagagacctccgcactggcctggtggtgctgggcgcccacgtcctgagtactgcggagcccacccagcaggtgtttggcatcgatgctctcaccacgcaccccgactaccaccccatgacccacgccaacgacatctgcctgctgcggctgaacggctctgctgtcctgggccctgcagtggggctgctgaggctgccagggagaagggccaggccccccacagcggggacacggtgccgggtggctggctggggcttcgtgtctgactttgaggagctgccgcctggactgatggaggccaaggtccgagtgctggacccggacgtctgcaacagctcctggaagggccacctgacacttaccatgctctgcacccgcagtggggacagccacagacggggcttctgctcggccgactccggagggcccctggtgtgcaggaaccgggctcacggcctcgtttccttctcgggcctctggtgcggcgaccccaagacccccgacgtgtacacgcaggtgtccgcctttgtggcctggatctgggacgtggttcggcggagcagtccccagcccggccccctgcctgggaccaccaggcccccaggagaagccgcc

SEQ ID NO: 5648 - DNA, 1122 bp, Homo Sapiens
ccagccatggtgcattacatctaccagcgctttcgagtcttggagcaagggctggaaaaatgtacccaagcaacgagggcatacattcaagaattccaagagttctcaaaaaatatatctgtcatgctgggaagatgtcagacctacacaagtgagtacaagagtgcagtgggtaacttggcactgagagttgaacgtgcccaacgggagattgactacatacaataccttcgagaggctgacgagtgcatcgtatcagaggacaagacactggcagaaatgttgctccaagaagctgaagaagagaaaaagatccggactctgctgaatgcaagctgtgacaacatgctgatgggcataaagtctttgaaaatagtgaagaagatgatggacacacatggctcttggatgaaagatgctgtctataactctccaaaggtgtacttattaattggatccagaaacaacactgtttgggaatttgcaaacatacgggcattcatggaggataacaccaagccagctccccggaagcaaatcctaacactttcctggcagggaacaggccaagtgatctacaaaggttttctattttttcataaccaagcaacttctaatgagataatcaaatataacctgcagaagaggactgtggaagatcgaatgctgctcccaggaggggtaggccgagcattggtttaccagcactccccctcaacttacattgacctggctgtggatgagcatgggctctgggccatccactctgggccaggcacccatagccatttggttctcacaaagattgagccgggcacactgggagtggagcattcatgggataccccatgcagaagccaggatgctgaagcctcattcctcttgtgtggggttctctatgtggtctacagtactgggggccagggccctcatcgcatcacctgcatctatgatccactgggcactatcagtgaggaggacttgcccaacttgttcttccccaagagaccaagaagtcactccatgatccattacaaccccagagataagcagctctatgcctggaatgaaggaaaccagatcatttacaaactccagacaaagagaaagctgcctctgaag

SEQ ID NO: 5649 - DNA, 1470 bp, Homo Sapiens
gatttgggggatgtgggacctccaattcccagccccggcttcagctctttcccaggtgttgactccagctccagcttcagctccagctccaggtcgggctccagctccagccgcagcttaggcagcggaggttctgtgtcccagttgttttccaatttcaccggctccgtggatgaccgtgggacctgccagtgctctgtttccctgccagacaccacctttcccgtggacagagtggaacgcttggaattcacagctcatgttctttctcagaagtttgagaaagaactttccaaagtgagggaatatgtccaattaattagtgtgtatgaaaagaaactgttaaacctaactgtccgaattgacatcatggagaaggataccatttcttacactgaactggacttcgagctgatcaaggtagaagtgaaggagatggaaaaactggtcatacagctgaaggagagttttggtggaagctcagaaattgttgaccagctggaggtggagataagaaatatgactctcttggtagagaagcttgagacactagacaaaaacaatgtccttgccattcgccgagaaatcgtggctctgaagaccaagctgaaagagtgtgaggcctctaaagatcaaaacacccctgtcgtccaccctcctcccactccagggagctgtggtcatggtggtgtggtgaacatcagcaaaccgtctgtggttcagctcaactggagagggttttcttatctatatggtgcttggggtagggattactctccccagcatccaaacaaaggactgtattgggtggcgccattgaatacagatgggagactgttggagtattatagactgtacaacacactggatgatttgctattgtatataaatgctcgagagttgcggatcacctatggccaaggtagtggtacagcagtttacaacaacaacatgtacgtcaacatgtacaacaccgggaatattgccagagttaacctgaccaccaacacgattgctgtgactcaaactctccctaatgctgcctataataaccgcttttcatatgctaatgttgcttggcaagatattgactttgctgtggatgagaatggattgtgggttatttattcaactgaagccagcactggtaacatggtgattagtaaactcaatgacaccacacttcaggtgctaaacacttggtataccaagcagtataaaccatctgcttctaacgccttcatggtatgtggggttctgtatgccacccgtactatgaacaccagaacagaagagattttttactattatgacacaaacacagggaaagagggcaaactagacattgtaatgcataagatgcaggaaaaagtgcagagcattaactataacccttttgaccagaaactttatgtctataacgatggttaccttctgaattatgatctttctgtcttgcagaagccccag

SEQ ID NO: 5650 - DNA, 204 bp, Homo Sapiens
gacgatgttccacaggagcccgtgcccacgctgtggaacgagccggccgagctgccgtcgggagaaggccccgtggagagcaccagccccggccgggagcccgtggacaccggtcccccagcccccaccgtcgcgccaggacccgaggacagcaccgcgcaggagcggctggaccagggcggcgggtcgctggggcccggcgct

SEQ ID NO: 5651 - DNA, 579 bp, Homo Sapiens
ttaccacagctcaaacctgctttgggactccctcccacaaaactggctccggatcagggaacactaccaaaccaacagcagtcaaatcaggtctttccttctttaagtctgataccattaacacagatgctcacactggggccagatctgcatctgttaaatcctgctgcaggaatgacacctggtacccagacccacccattgaccctgggagggttgaatgtacaacagcaactgcacccacatgtgttaccaatttttgtcacacaacttggagcccagggcactatcctaagctcagaggaattgccacaaatcttcacgagcctcatcatccattccttgttcccgggaggcatcctgcccaccagtcaggcaggggctaatccagatgtccaggatggaagccttccagcaggaggagcaggtgtaaatcctgccacccagggaaccccagcaggccgcctcccaactcccagtggcacagatgacgactttgcagtgaccacccctgcaggcatccaaaggagcacacatgccattgaggaagccaccacagaatcagcaaatggaattcag

SEQ ID NO: 5652 - DNA, 1125 bp, Homo Sapiens
aaacccggagaccaaatccttgattggcagtatggagttactcaggccttccctcacacagaggaggaggtggaagttgattcacacgcgtacagccacaggtggaaaagaaacttggactttctcaaggcggtagacacgaaccgagcaagcgtcggccaagactctcctgagcccagaagcttcacagacctgctgctggatgatgggcaggacaataacactcagatcgagagagtgaatctgtccttcgattttccattttatggccacttcctacgtgaaatcactgtggcaaccgggggtttcatatacactggagaagtcgtacatcgaatgctaacagccacacagtacatagcacctttaatggcaaatttcgatcccagtgtatccagaaattcaactgtcagatattttgataatggcacagcacttgtggtccagtgggaccatgtacatctccaggataattataacctgggaagcttcacattccaggcaaccctgctcatggatggacgaatcatctttggatacaaagaaattcctgtcttggtcacacagataagttcaaccaatcatccagtgaaagtcggactgtccgatgcatttgtcgttgtccacaggatccaacaaattcccaatgttcgaagaagaacaatttatgaataccaccgagtagagctacaaatgtcaaaaattaccaacatttcggctgtggagatgaccccattacccacatgcctccagtttaacagatgtggcccctgtgtatcttctcagattggcttcaactgcagttggtgtagtaaacttcaaagatgttccagtggatttgatcgtcatcggcaggactgggtggacagtggatgccctgaagagtcaaaagagaagatgtgtgagaatacagaaccagtggaaacttcttctcgaaccaccacaaccgtaggagcgacaaccacccagttcagggtcctaactaccaccagaagagcagtgacttctcagtttcccaccagcctccctacagaagatgataccaagatagcactacatctaaaagataatggagcttctacagatgacagtgcagctgagaagaaagggggaaccctccacgct

SEQ ID NO: 5653 - DNA, 897 bp, Homo Sapiens
cggagcatcggtgttgtggaggagaaagtttcccaaaacttggggaccaacttgcctcagctcggacaaccttcctccactggcccctctaactctgaacatccgcagcccgctctggaccctaggtctaatgacttggcaagggttcctctgaagctcagcgtgcctgcatcagatggcttcccacctgcaggaggttctgcagtgcagaggtggcctccatcgtgggggctgcctgccatggattcctggccccctgaggatccttggcagatgatggctgctgcggctgaggaccgcctgggggaagcgctgcctgaagaactctcttacctctccagtgctgcggccctcgctccgggcagtggccctttgcctggggagtcttctcccgatgccacaggcctctcacccaaggcttcactcctccaccaggactcggagtccagacgactgccccgttctaattcactgggagccgggggaaaaatcctttcccaacgccctccctggtctctcatccacagggttctgcctgatcacccctggggtaccctgaatcccagtgtgtcctggggaggtggaggccctgggactggttggggaacgaggcccatgccacaccctgagggaatctggggtatcaataatcaacccccaggtaccagctggggaaatattaatcggtatccaggaggcagctggggaaatattaatcggtatccaggaggcagctgggggaatattaatcggtatccaggaggcagctgggggaatattcatctatacccaggtatcaataacccatttcctcctggagtcctccgccctcctggctcttcttggaacatcccagctggcttccctaatcctccaagccctaggttgcagtggggc

SEQ ID NO: 5654 - DNA, 258 bp, Homo Sapiens
tgctgcatgaagaggaagaagaagaccgccaacccggagaacaacctgagctactggaacaacaccatcaccatggactacttcaacaggcatgctgtggagctgcccagggagatccagtcccttgaaacctctgaggaccagctctcagagccccgctccccagccaatggcgactatagagacactgggatggtccttgttaaccccttctgtcaagaaacactgtttgtgggaaacgatcaagtatctgagatc

SEQ ID NO: 5655 - DNA, 1893 bp, Homo Sapiens
aacaaagaaacggcaaagaagattaaaaggcccaagttcactgtgcctcagatcaactgcgatgtcaaagccggaaagatcatcgatcctgagttcattgtgaaatgtccagcaggatgccaagaccccaaataccatgtttatggcactgacgtgtatgcatcctactccagtgtgtgtggcgctgccgtacacagtggtgtgcttgataattcaggagggaaaatacttgttcggaaggttgctggacagtctggttacaaagggagttattccaacggtgtccaatcgttatccctaccacgatggagagaatcctttatcgtcttagaaagtaaacccaaaaagggtgtaacctacccatcagctcttacatactcatcatcgaaaagtccagctgcccaagcaggtgagaccacaaaagcctatcagaggccacctattccagggacaactgcacagccggtcactctgatgcagcttctggctgtcactgtagctgtggccacccccaccaccttgccaaggccatccccttctgctgcttctaccaccagcatccccagaccacaatcagtgggccacaggagccaggagatggatctctggtccactgccacctacacaagcagccaaaacaggcccagagctgatccaggtatccaaaggcaagatccttcaggagctgccttccagaaacctgttggagcggatgtcagcctggactgcaaaattgacttgtcgtttttaattgatgggagcaccagcattggcaaacggcgattccgaatccagaagcagctcctggctgatgttgcccaagctcttgacattggccctgccggtccactgatgggtgttgtccagtatggagacaaccctgctactcactttaacctcaagacacacacgaactctcgagatctgaagacagccatagagaaaattactcagagaggaggactttctaatgtaggtcgggccatctcctttgtgaccaagaacttcttttccaaagccaatggaaacagaagcggggctcccaatgtggtggtggtgatggtggatggctggcccacggacaaagtggaggaggcttcaagacttgcgagagagtcaggaatcaacattttcttcatcaccattgaaggtgctgctgaaaatgagaagcagtatgtggtggagcccaactttgcaaacaaggccgtgtgcagaacaaacggcttctactcgctccacgtgcagagctggtttggcctccacaagaccctgcagcctctggtgaagcgggtctgcgacactgaccgcctggcctgcagcaagacctgcttgaactcggctgacattggcttcgtcatcgacggctccagcagtgtggggacgggcaacttccgcaccgtcctccagtttgtgaccaacctcaccaaagagtttgagatttccgacacggacacgcgcatcggggccgtgcagtacacctacgaacagcggctggagtttgggttcgacaagtacagcagcaggcctgacatcatcaacgccatcaagagggtgggctactggagtggtggcaccagcacgggggctgccatcaacttcgccctggagcagctcttcaagaagtccaagcccaacaagaggaagttaatgatcctcatcaccgacgggaggtcctacgacgacgtccggatcccagccatggctgcccatctgaagggagtgatcacctatgcgataggcgttgcctgggctgcccaagaggagctagaagtcattgccactcaccccgccagagaccactccttctttgtggacgagtttgacaacctctatcagtatgtccccaggatcatccagaacatttgtacagagttcaactcacagcctcggaac

SEQ ID NO: 5656 - DNA, 237 bp, Homo Sapiens
gccacagtaagaaatgaggacaaatggaagccactcaacaaccccagaaacagagatctgtttttcagaaggcttcaggcatattttaagggcagaggtcttgatcttggaacatttccaaatcctttccccacgaatgaaaatcctagacctctctctttccagtcagaacttactgcttctgcatctgcagattatgaagagcagaaaaactcctttcacaattatctcaaaggc

SEQ ID NO: 5657 - DNA, 306 bp, Homo Sapiens
aggccccgggggcgcaggggagcgcgcgtcacggataaggagcccaagccgttgcttttcctccccgcggccggggccggccggactcccagcggctcccggagcgcagaaatattcccaagagactctaacttaaaagacaaattcataaagcatttcacagggccggtcacattttcaccagaatgcagcaaacatttccaccgactctattacaataccagggagtgctcaacgccagcttattacaaaagatgtgctagattgttaacaagattagcagtgagtccactgtgctcccagacc

SEQ ID NO: 5658 - DNA, 1335 bp, Homo Sapiens
cggctccggggaccctgggggcgcgccgtcggagagaggaccctgccgggggcccaagaccgagacgacggggaggaggcggacggcggaggcccggcggaccagttcagcgacgggcgcgagccactgccgggagggtgcagccttgtttgcaagccgtcggccctggcccagtgcctgctgcgcgccctgcggcgctcagaggcgctggaggccggcccgcgctcctggttctccgggccccacctgcagaccctctgccacttcgtcctgcccgtagcgcctgggcctgagctggcccgggagtacctgcagttggcggacgatgggctagtggccctggactgggtggtaggaccttgtgttcggggccgccggatcaccagcgccgggggccttcctgcggtgcttctggtgatccccaatgcgtggggtcgcctcacccgcaacgtgctcggcctttgcttgctcgccctggagcgcggctactacccggtcatcttccatcgccgcggccaccacggttgcccactggtcagcccccggctgcagcctttcggggacccgtccgacctcaaggaggcggtcacatacatccgcttccgacacccggcggcgccgctgttcgcggtgagcgaaggctcgggctcggcgctgctcctgtcctacctgggcgagtgcggctcctccagctacgtgacaggcgccgcctgcatctcgcccgtgctgcgctgccgagagtggttcgaggccggcctgccctggccctacgagcggggctttctgctctaccagaagatcgccctcagcaggtatgccacagccctggaggacactgtggacaccagcagactgttcaggagccgttcccttcgagagtttgaggaggctctcttctgccacaccaaaagcttccccatcagctgggatgcctactgggaccgcaacgacccgctccgggatgtcgatgaggcagccgtgcctgtgctgtgtatctgcagtgctgacgaccccgtgtgtggacccccagaccacactctgacaactgaactcttccacagcaacccctacttcttcctcctgctcagtcgccacggaggccactgtggcttcctgcgccaggagcccttgccagcctggagccatgaggtcatcttggagtccttccgggccttgactgagttcttccgaacggaggagaggattaaagggctgagcaggcacagagcttccttccttgggggccgtcgtcgtgggggagccttgcagaggcgggaagtctcttcctcttccaacctggaggagatctttaactggaagcgatcatacacaagg

SEQ ID NO: 5659 - DNA, 3870 bp, Homo Sapiens
ggaccccctgtccccgcttcatcaagcacaaagttgttaatgacaagctattctatgcgctccacggtggtgtctcgctatgcccacaccttggtcacctctgtcctgtttaatccacatgctgaagcccatgaagccatctttgacctggatctgcctcatcttgcctttatctccaatttcactatgaccatcaacaataaagtctacattgcagaagtcaaagagaagcaccaggcaaagaaaatctatgaagaagcccatcagcagggaaagacagctgctcatgtaggcatcagggaccgggaatcagagaagttccgcatctccaccagcctggcagcaggcacagaggtgactttttccctggcctatgaggaactgcttcagcggcaccagggccagtaccagctggtggtgagcctgaggcctggccaattggtgaagaggctgagcatagaggttacagtgtcagaaaggacaggcatctcctatgtgcacataccacccctgaggaccggccgtctgcgcaccaatgcccatgcaagtgaggtggattcacccccatccaccaggatcgagaggggagagacctgtgtccgaatcacctactgcccgacattgcaagaccagtcgtccatctctgggtcaggcatcatggctgacttcctggttcagtacgatgtggtcatggaggacatcattggagacgtgcagatttacgatgactatttcattcactactttgcccccagaggccttccacctatggagaagaatgtggtttttgttattgacgtaagcagctccatgtttggtaccaagatggaacagactaaaacggccatgaatgtgatcctcagtgaccttcaagccaatgactacttcaacatcatctccttttctgacacagttaatgtttggaaagctggaggctcaatccaggccaccatccagaatgtccacagtgccaaggactacctgcattgcatggaagccgatggctggacagacgtcaactcagctctgctggcagctgcttcagtgctgaaccatagcaaccaggagcctgggaggggccccagtgtggggaggatccctcttatcatcttcctgacggatggggagcccacggccggcgtgacgacccccagtgtgatcctctccaatgtccgtcaggcgctaggccacagggtatcccttttcagcttggcctttggggatgatgctgactttacactgctgcgccgcctgtccctggaaaaccggggaatagcccggcgcatatatgaggacactgatgcggccctacagctgaagggcctctatgaggagatctccatgcctctgctggcagatgtgcgtctgaactacctgggtggcttggttggggcctccccttgggccgttttccccaactactttggtggctctgagctggtggtggcaggacaggtgcagccaggcaaacaggaactgggcatccacctggcagcccgtggccccaaggatcagcttcttgtggcccaccacagtgaaggggccaccaacaacagccagaaggcctttggttgcccaggggagccagcccccaatgtggcccacttcatccgccgcctctgggcctatgtcaccattggagaactgctggatgcacacttccaagctcgtgacaccaccactcgccacctgctggctgccaaagtcctcaacctgtcccttgaatacaactttgtcacacctctgacttcactggtcatggtgcaacccaaacaggccagtgaggagaccaggagacagacttccacctctgctgggccagacaccatcatgccctcatccagcagcaggcatggcctaggggtaagcacagctcagccagccttggtgcccaaggtcatctcccccaaatcaaggcctgtgaaaccaaagttctacttatcctcaactactactgcctctaccaagaagatgctaagttccaaagagctggagccattgggagagagccctcataccctgtcaatgcccacatacccaaaggccaaaattccagcacaacaggattctggcaccttggcccagccaactctcaggacaaaacctaccattcttgtgccctcaaattctggtactctgttgcctctgaagcccggctctctatcacaccagaatcctgatatattacccacgaactccaggacacaagtcccacctgtgaaacctggcatcccagcctcgcccaaagctgacactgtgaaatgtgttactccactgcattccaaacctggtgctccatcgcacccccaacttggggcactcacatcacaggcacctaaaggcctgccacagtcaagacctggagtctctacacttcaggttcccaagtacccactacacaccagacctagggttcctgctcccaagacccgaaacaacatgccacacctggggcctggaatcctcttgtccaagacccctaaaatcttattatctcttaaaccgagtgccccaccacaccaaatttccacaagcatatcactttccaagcctgagaccccaaacccccatatgcctcaaaccccactacctcctagacctgacagaccaaggcccccacttcctgagagcctaagcacattcccaaatacaatctcaagttccacaggtcccagcagtaccacaaccacctctgtccttggagaacccctccccatgccctttactcccactctgccccctggaaggttctggcatcagtatgacctcctcccgggtccccagaggaccaggcaagttctgggaccatctaggccaggagttccaacaatgagcctactcaacagctccaggcctacaccagaaggcagccctccaaacctgccaatcttgctgccttctagcatcctccctgaggccatcagtctgctccttctccctgaggagctagagctgctgtctgaatcaatggtggaatccaagttcgtggagtccttgaacccaccagctttctataccttcctcactcctgatgaagatggaagtccaaactgggatggcaattctgaggagatcctgggaggagctggaggcagcatggaatctcaaggaagttctgtggggttagcaaaaggcacattgcctagcatcttcaccttctcctcctcagtggacggggacccccactttgtgatccaaatcccacactcagaagagaagatctgcttcacactgaatgggcaccctggggacttgctgcagctcatagaggacccaaaggcagggctgcatgtgagtgggaagctgcttggcgcaccaccaaggccgggccacaaggaccagactcgcacctacttccagatcatcacagtcactacagacaaaccccgggcctatactatcaccatcagccgcagttctatatctttgcgaggcgagggtaccttgcgcctgtcctgggaccaacctgccctgctgaagaggccccagctggagctctatgtggctgctgcagcccgccttaccctccgccttgggccctaccttgagttcctagtcctccgacaccgctacaggcatcccagtaccctgcaactaccccacctggggttctacgtggccaatggctcaggcctcagcccctcagcccgtggcctgatagggcagttccagcacgcagacatccgactggtgacaggacctatggggccatgcttacgaaggcaccatggcccagatgtgcctgtgattctaggcaagaggctgctgaaggactcaccaaggctgctgccccgctgggcttcctgctggctggtgaagcgctctcatgtagagctgcttctgggccacccctacctctcctatgtcctg

SEQ ID NO: 5660 - DNA, 1269 bp, Homo Sapiens
cgagcccgcccagacatgttctgccttttccatgggaagagatactcccccggcgagagctggcacccctacttggagccacaaggcctgatgtactgcctgcgctgtacctgctcagagggcgcccatgtgagttgttaccgcctccactgtccgcctgtccactgcccccagcctgtgacggagccacagcaatgctgtcccaagtgtgtggaacctcacactccctctggactccgggccccaccaaagtcctgccagcacaacgggaccatgtaccaacacggagagatcttcagtgcccatgagctgttcccctcccgcctgcccaaccagtgtgtcctctgcagctgcacagagggccagatctactgcggcctcacaacctgccccgaaccaggctgcccagcacccctcccgctgccagactcctgctgccaggcctgcaaagatgaggcaagtgagcaatcggatgaagaggacagtgtgcagtcgctccatggggtgagacatcctcaggatccatgttccagtgatgctgggagaaagagaggcccgggcaccccagcccccactggcctcagcgcccctctgagcttcatccctcgccacttcagacccaagggagcaggcagcacaactgtcaagatcgtcctgaaggagaaacataagaaagcctgtgtgcatggcgggaagacgtactcccacggggaggtgtggcacccggccttccgtgccttcggccccttgccctgcatcctatgcacctgtgaggatggccgccaggactgccagcgtgtgacctgtcccaccgagtacccctgccgtcaccccgagaaagtggctgggaagtgctgcaagatttgcccagaggacaaagcagaccctggccacagtgagatcagttctaccaggtgtcccaaggcaccgggccgggtcctcgtccacacatcggtatccccaagcccagacaacctgcgtcgctttgccctggaacacgaggcctcggacttggtggagatctacctctggaagctggtaaaagatgaggaaactgaggctcagagaggtgaagtacctggcccaaggccacacagccagaatcttccacttgactcagatcaagaaagtcaggaagcaagacttccagaaagaggcacagcacttccgactgctcgctggcccccacgaaggtcactggaacgtcttcctagcccagaccctggagctgaaggtcacggccagtccagacaaagtgaccaagacata

SEQ ID NO: 5661 - DNA, 549 bp, Homo Sapiens
tttaaaaatgatgccacagaaatcctttattcacatgtggttaaacctgttccagcacaccccagcagcaacagcacgttgaatcaagccagaaatggaggcaggcatttcagtaacactggactggatcggaacactcgggttcaagtgggttgccgggaactgcgttccaccaaatacatctctgatggccagtgcaccagcatcagccctctgaaggagctggtgtgtgctggcgagtgcttgcccctgccagtgctccctaactggattggaggaggctatggaacaaagtactggagcaggaggagctcccaggagtggcggtgtgtcaatgacaaaacccgtacccagagaatccagctgcagtgccaagatggcagcacacgcacctacaaaatcacagtagtcactgcctgcaagtgcaagaggtacacccggcagcacaacgagtccagtcacaactttgagagcatgtcacctgccaagccagtccagcatcacagagagcggaaaagagccagcaaatccagcaagcacagcatgagt

SEQ ID NO: 5662 - DNA, 186 bp, Homo Sapiens
cttgtctgcccagctgttgcttctgagatcacagtcttcttattcttaagtgacgctgcggtaaacctccaagttgccaaacttaatccacctccagaagctcttgcagccaagttggaagtgaagcactgcaccgatcagatatcttttaagaaacgactctcattgaaaaagtcctggtggaaa

SEQ ID NO: 5663 - DNA, 1335 bp, Homo Sapiens
gataataaaagaccatgccttgaattctctcagctaagtgtaaaggattccttcagagatttatttattccgagaatagagaccattctgatgatgtatacaaggaacaacctaaactgtgctgagccactgtttgaacaaaataactcacttaatgttaatttcaacacacaaaagaaaacagtctggcttattcacggatacagaccagtaggctccatcccattatggcttcagaacttcgtaaggattttgctgaatgaagaagatatgaatgtaattgtagtagactggagccggggtgctacaacttttatttataatagagcagttaaaaacaccagaaaagttgctgtgagtttgagtgtgcacattaaaaatcttttgaagcatggtgcatctcttgacaattttcatttcataggtgtgagcttaggggctcatatcagtggatttgttggaaagatatttcatggtcaacttggaagaataacaggtcttgaccctgctgggccaaggttctccagaaaaccaccatatagcagattagattacacggatgcaaagtttgtggatgtcatccattctgactccaatggtttaggcattcaagagcccttgggacatatagatttttatccaaatggaggaaataaacaacctggctgtcctaaatcaattttctcaggaattcaattcattaaatgcaaccaccagagagcagttcacttgttcatggcatctttagaaacaaactgcaattttatttcatttccttgtcgttcatacaaagattacaagactagcttatgtgtggactgtgactgttttaaggaaaaatcatgtcctcggctgggttatcaagccaagctatttaaaggtgttttaaaagaaaggatggaaggaagacctcttaggaccactgtgtttttggatacaagtggtacatatccattctgtacctattattttgttctcagtataattgttccagataaaactatgatggatggctcgttttcatttaaattattaaatcagcttggaatgattgaagagccaaggctttatgaaaagaacaaaccattttataaacttcaagaagtcaagattcttgctcaattttataatgactttgtaaatatttcaagcattggtttgacatatttccagagctcaaatctgcagtgttccacatgcacatacaagatccagagactcatgttaaaatcacttacatacccagaaagaccaccactttgcaggtataatattgtacttaaagacagagaggaagtgtttcttaatccaaacacatgtacaccaaagaacaca

SEQ ID NO: 5664 - DNA, 576 bp, Homo Sapiens
tgggtagggggctcagtccccaacctgggccctgctgagcaggagcagaaccattacctggcccagctgtttggcctgtacggcgagaatgggacgctgactgcagggggcttggcgcggcttctccacagcctggggctaggccgagttcaggggcttcgcctgggacagcatgggcctctgactggacgggctgcatccccagctgcagacaattccacacacaggccacagaaccctgagctgagtgtggatgtctgggcagggatgcctctgggtccctcagggtggggtgacctggaagagtcaaaggcccctcacctaccccgtgggccagccccctcgggcctggacctccttcacaggcttctgttgctggaccactcattggctgaccacctgaatgaggattgtctgaacggctcccagctgctggtcaattttggcttgagccccgctgctcctctgacccctcgtcagtttgctctgctgtgcccagccctgctttatcagatcgacagccgcgtctgcatcggcgctccggcccctgcacccccaggggatctactatctgcc

SEQ ID NO: 5665 - DNA, 1137 bp, Homo Sapiens
cacttcctagtatttgaccaaaaaaaggagtactatcatggctcctttaaaattttagatccacaaatcaataacaatttcggacaaagcaacacatatcaacttaaggacttacgagagacgaccgaaaatttggtggatgagatatttatagattcagcctggaagaaaaattatatcaagaaccaagtagtcagactgactccagaggaagatggtgtgaaagtagatgtcattatggtgttccagttcccctctactgaacaaagggcagtaagagagaagaaaatccaaagcatcttaaatcagaagataaggaatttaagagccttgccaataaatgcctcatcagttcaagttaatgcaatgagctcatcaacaggggagttaactgtccaagcaagttgtggtaaacgagttgttccattaaacgtcaacagaatagcatctggagtcattgcacccaaggcggcctggccttggcaagcttcccttcagtatgataacatccatcagtgtggggccaccttgattagtaacacatggcttgtcactgcagcacactgcttccagaagtataaaaatccacatcaatggactgttagttttggaacaaaaatcaaccctcccttaatgaaaagaaatgtcagaagatttattatccatgagaagtaccgctctgcagcaagagagtacgacattgctgttgtgcaggtctcttccagagtcaccttttcggatgacatacgccggatttgtttgccagaagcctctgcatccttccaaccaaatttgactgtccacatcacaggatttggagcactttactatggtggggaatcccaaaatgatctccgagaagccagagtgaaaatcataagtgacgatgtctgcaagcaaccacaggtgtatggcaatgatataaaacctggaatgttctgtgccggatatatggaaggaatttatgatgcctgcaggggtgattctgggggacctttagtcacaagggatctgaaagatacgtggtatctcattggaattgtaagctggggagataactgtggtcaaaaggacaagcctggagtctacacacaagtgacttattaccgaaactggattgcttcaaaaacaggcatc

SEQ ID NO: 5666 - DNA, 1236 bp, Homo Sapiens
gctcccagcgctgccccagagcaagtccatctgtcttacccaggtgagccaggctccatgactgtaacttggaccacatgggtcccaacccgctctgaagtgcaattcgggttgcagccgtcggggcccctgcccctccgcgcccagggcaccttcgtcccctttgtggacgggggcattctccggcggaagctctacatacaccgagtcacgcttcgcaagctgctgccaggggttcagtatgtttatcgctgtggcagtgcgcagggctggagccgtcggttccgcttcagggccctcaagaatggggcccactggagtccccgtctggctgtgtttggagacctgggggctgacaacccgaaggccgtcccccggctgcgcagggacacccagcagggcatgtatgacgccgttctccatgtgggagactttgcctacaacctggatcaggacaacgcccgtgttggggataggttcatgcggctcattgaacccgtggctgccagcctgccatacatgacatgccctgggaatcatgaagaacgctacaacttctctaactacaaggctcgcttcagcatgccgggggataatgagggcctgtggtacagctgggatctgggtcccgcccacatcatctccttctccaccgaggtctatttctttctccattatggccgccacttggtacagaggcagtttcgctggctggagagcgacctccagaaagccaataagaaccgggcagcccggccgtggatcatcactatggggcaccggcccatgtactgctccaacgcagatctggacgactgcacacgacatgaaagcaaggtccgcaaaggcctccaaggcaagctgtacgggttggaggatcttttctacaaatatggagtggatctgcagctgtgggctcatgagcactcgtatgaacgactgtggccaatttacaactaccaggtatttaacggcagccgagagatgccctacaccaacccgcgagggcctgtccacatcatcacaggatctgctggctgtgaggagcggctgacgccctttgctgtcttcccgaggccctggagtgccgtgcgtgtgaaggagtacgggtatacgcggctgcacatcctcaacgggacccacatccacatccagcaggtgtcggacgaccaggatgggaagatcgtagatgatgtctgggtggtgagacccctgtttggccggaggatgtacctc

SEQ ID NO: 5667 - DNA, 264 bp, Homo Sapiens
tcggattattggcttcttgcaactgaagtggggagatgttcaggtgaaaagaatatagagaacgtcacttttcaccatgaagggttcttctggaggtgttggtttaatgggattgtggaagagaatgactccaatatttggaagttctggtacaccaatcagccaccgtccaagaactgcacacatgcttacctgtctccgtaccccttcatgagaggcgagcacaactcgacctcctatgactctgcagttatttaccgtggt

SEQ ID NO: 5668 - DNA, 327 bp, Homo Sapiens
atgtatgccaaatgtgaaaatgagccatttgctggtgtatctgaatcatataatgggactggagaattgggaaacttgatagccccttgtaatgccaattgtaactgttcgcgatcatattattatcctgtctgtggagatggagtccaatatttttctccctgctttgcaggctgttcaaacccagttgcacacaggaagccaaaggtatattacaactgttcctgtattgaaaggaaaacagaaataacatccactgcagaaacttttggttttgaagctaaagctggaaaatgtgaaactcattgtgcgaaactgcccatattc

SEQ ID NO: 5669 - DNA, 2082 bp, Homo Sapiens
ctacacctaatcctcttacctgctacaggcaatgtggcagagaattctccacctgggacttcagtgcacaagttttctgtgaagttatcagcatcattgtcacctgtgatcccaggatttccccagatagtcaactcaaatcccctcactgaagcttttagggtgaattggctgtcaggcacctactttgaggttgtcaccactgggatggaacaactagattttgaaacaggaccaaacatatttgatttgcagatttatgtgaaggatgaggttggtgtcacagaccttcaagtcctgactgtccaggtaacagatgtgaacgagccacctcagtttcaaggcaacttggcagaaggtctacacctctacatagtagaaagagcaaaccctggattcatttaccaggttgaggccttcgatccagaagacacaagccgaaacattcccctcagttatttcctgatttctcccccaaagagcttcagaatgtctgctaatggcaccctcttctccacaacagaattggactttgaagcaggacacagaagtttccatctcatcgtggaggtgagggacagtggaggcctcaaagcctccacagagctccaggtgaacatcgtgaacctcaacgacgaagtccctcgctttaccagcccgacacgagtgtacacagtcctggaggaactgagtccaggaaccatcgtggccaatatcacagcggaggatcctgatgatgaaggttttcccagccacctcctctacagcattaccactgttagcaaatatttcatgataaatcagttgactggtacaatccaagtggcccaaaggatagaccgagatgcaggtgaattgagacaaaatcccaccatttccctggaagttctagtgaaggacagaccatatgggggtcaggagaatcgcatccagataaccttcattgtggaagacgtcaacgacaatcctgccacatgccaaaagttcaccttcagcattatggtgccggaaagaacagccaaggggacgttgcttcttgacctaaacaagttctgctttgatgatgacagtgaggcaccaaacaacagattcaacttcaccatgccatctggagtggggagcggcagcagatttttacaggatccagctggctctgggaagattgtgctgattggtgatctagactacgaaaatccaagtaacctagcagccggcaataaatatacggtgataatccaggtgcaggatgtggcccccccttactataaaaataacgtctacgtttatatcctaacaagcccagaaaatgagtttcctctcatttttgataggccatcctatgtatttgatgtgtcagaaagaaggcccgccagaacccgagtgggacaggtgcgagccactgataaagacctcccccagagcagcctcctgtactccatctccactggaggggccagcctccagtatccaaatgtattttggattaatcccaagacaggagaactccagctggtaactaaagtggactgtgaaacaacccccatctatattctcagaatccaggccaccaacaacgaagacacaagctctgtcactgttactgtgaacatccttgaagaaaatgatgaaaagccaatttgtactccaaactcttatttcctggccctcccagtggatctgaaagttggcacaaatattcagaatttcaagctgacatgtaccgaccttgattccagccccagatctttccgttattccattggcccaggtaacgtcaacaatcatttcaccttctctcccaatgctggttccaatgtcacacgcctgctgcttacatctcgctttgactatgctggtgggtttgataagatctgggactacaagctacttgtctacgtaactgatgacaacttgatgtctgacaggaagaaagcggaggctcttgttgagacaggaacagtgacactgagtattaaagtcattccccacccaaccactatcatcaccacgacccccaggcccagggtcacctatcaggtcctgaggaaaaacgtttactctccatctgcatggtacgtgccg

SEQ ID NO: 5670 - DNA, 303 bp, Homo Sapiens
aaagggaagttcgtaggctatcctggaaaatacacatatttatttaatgagtggagaagtgaagagtgtgatcctggaggctgtcttatagaattgacaacccaattgaccattataatgaccgggaaacagatttttggaaacattaaagaagccatttatcccttggctttgaattggtggagacgccgaaaagctcggacaaactctgagaagctgtatagtcgatgggagcaggatcatgaccttgaaagttttggaccccttgggcttttctatgagtacttagaaacagttactcaa

SEQ ID NO: 5671 - DNA, 2199 bp, Homo Sapiens
gctgtttcggatcagcatgccacaagccccttcgactggctcctctctgataagggacccttccatcgctcacaggaatacacagattttgtggacagaagccggcagggatttagcacaagatacaagatatacagggagtttggccgctggaaagtaaataaccttgcagttgagagaagaaatttccttggctctcctctgcctcttgcccctgaattcttccgcaacataagacttttgggacgtcgacctacccttcagcaaatcacagaaaaccttatcaagaaatatgggacacatttcttgctatctgctactctgggaggagaggagtcactcacaatttttgtggacaagcggaagttgagcaaacgagctgaaggaagtgattccaccaccaatagctcttcggtcactctggagacgctacatcagctagccgcttcttatttcattgacagggacagcacccttcggagacttcaccacattcaaattgcatccactgccataaaggtaacagaaacacggactggtcctcttggctgcagtaactatgacaacctagattctgtcagttctgttctggttcagagtcctgagaataagattcagttgcaagggcttcaagtacttctcccagactatcttcaggaacgttttgtacaagcagctttgagctacattgcttgcaattcagagggagagtttatctgcaaggaaaatgactgctggtgtcactgtggtcccaaatttccagaatgcaactgcccctccatggacattcaagccatggaagagaatcttcttcgaataactgaaacctggaaagcttacaacagtgactttgaggaatcagatgaattcaagttatttatgaaaaggctacctatgaattatttcctcaacacatctactataatgcatttgtggacaatggattctaattttcagcgccgttatgaacaactggagaacagcatgaaacaacttttcctaaaggcgcagaaaattgtacacaagctttttagccttagcaagaggtgtcataaacaacccctcatcagcctgccaagacaaagaacctcaacctactggcttactcgcatccagtcttttctctactgcaatgagaacggcctcctaggcagcttttcagaagagacgcactcgtgcacgtgtccgaatgaccaggtggtctgcaccgcgttcctgccctgcacagtgggagacgcctctgcctgcctgacatgcgcaccagacaaccgcacccgctgcggcacctgcaacaccggctacatgctcagccaggggctctgcaagcctgaagtcgccgagtccaccgatcactatattggctttgaaactgacctgcaagatctcgagatgaaatatctgctgcagaaaacggacagacgaatagaagtccatgccatttttatcagcaatgacatgcgcctcaatagctggtttgatccctcctggcgtaagcggatgctcctcaccttgaagagcaataagtacaagtcaagtctggtccatatgattttgggtctctctttacagatttgcttaactaaaaacagcaccttggagccagtgttggctgtttatgtcaatcccttcggaggcagccactctgagagctggtttatgcctgtgaatgaaaacagctttccagactgggagcggactaagttggacctacccctgcagtgttataactggacattaactctggggaacaaatggaagacattttttgagacagtacacatctacctgagaagtcgcatcaagtccaatggtcccaatggtaatgagagcatttactatgaacctctggagtttattgacccttcccggaacctgggctatatgaaaatcaataacattcaagtgtttggctacagcatgcactttgaccctgaagcaattcgggacctgattttgcagctggactacccctatactcagggatcccaggattcagcacttttgcaactactagagatcagagaccgtgtaaataaactctccccacctggtcagcgtcgtctagatcttttctcttgcttgcttcgtcatagactcaagctgtctactagtgaggtggtgaggatccaatctgctctgcaggcgtttaatgccaaattgccaaacacaatggattatgacacgaccaaattatgtagt

SEQ ID NO: 5672 - DNA, 390 bp, Homo Sapiens
cctgacatgatccgccatctccaggcagtggactacgcatcccgcaccaaagtgttccccggggagcgcgtagagcatgtaacttttaacttcacgttggagaatcagatccaccgaggcgggcagtacttcaatgacaagttcattgggctgcggctcaagtcagtgtcctttgaggattccctgtttgaagagtgttattttgaggatgtcacatccagcaacacgtttttccgcaactgcacattcatcaacactgtgttctataacactgacctgttcgagtacaagtttgtgaacagccgtctgataaacagtacattcctgcacaacaaggagggctgcccgctagacgtgacagggacgggcgaaggtgcctacatggtatac

SEQ ID NO: 5673 - DNA, 372 bp, Homo Sapiens
cctgatatgatccgctattttcaagatgaagaatacaagtctaaaatgaaggtgttttttggtgagcatgtgtacggcgccacaatcaacttcacgatggaaaatcagatccaccaacatgggaaacttgtgaatgataagttcacaagaatgtactttaaacatgtactctttgaggacacattctttgacgagtgctattttgaagacgtaacatcaacagatacctacttcaaaaattgtaccattgaatcaaccatcttttacaacacagacctctacgagcacaagttcatcaactgtcggtttatcaactccaccttcctggagcagaaggagggctgccacatggacttggagcaagataatgac

SEQ ID NO: 5674 - DNA, 1095 bp, Homo Sapiens
atgccaggggggaagaaggtggctgggggtggcagcagcggtgccactccaacgtccgctgcggccaccgccccctctggggtcaggcgtttggagaccagcgaaggaacctcagcccagagagatgaggagccagaagaggaaggggaagaggacctgcgagacggaggcgtccccttctttgtcaaccggggtgggctacctgtggatgaggccacctgggaaaggatgtggaaacacgtggccaagatccaccccgatggagagaaggtggcgcaacggatccgtggggccacagacctgcccaagatccccataccgagtgtgcctacgttccagccgtctacacctgtccctgagcgcctggaagctgtgcagcgctacatcagagagctgcagtacaatcacacagggacacagttctttgaaattaagaagagcagacctctgacagggctgatggacctggccaaggaaatgaccaaagaggccctgccaatcaaatgcctggaagccgtgatcctgggaatttacctcaccaacagcatgcccaccctggagcgcttccccatcagcttcaagacctacttctcagggaactacttccgccacatcgtgctgggggtgaacttcgcgggccgctacggtgcgctgggcatgagtcggcgcgaggacctgatgtacaagccgcccgccttccgcacgctcagcgagctcgtgctggacttcgaggccgcctacggccgctgctggcacgtgctcaagaaggtgaagctgggccagagcgtgtcacacgacccgcacagcgtggagcagatcgagtggaagcactcggtgctggacgtggagcgcctgggccgcgatgacttccgcaaggagctggagcgccacgcccgcgacatgcggctcaagattggcaaagggacgggccctccctctcccaccaaggaccggaagaaggatgtttcttccccgcagcgggcccagtccagcccccaccgcaggaacagccgcagtgaaagacggccctcgggtgacaagaagacttccgagcccaaagccatgccagaccttaacgggtaccagatccgggtc

SEQ ID NO: 5675 - DNA, 204 bp, Homo Sapiens
atgggctccgtggggagccagcgccttgaggagcccagcgtggcaggcacaccagacccgggcgtagtgatgagcttcaccttcgacagtcaccagctggaggaggcggcggaggcggctcagggccagggccttagggccaggggcgtcccagctttcacggatactacattggacgagccagtgcccgatgaccgttatcac

SEQ ID NO: 5676 - DNA, 3282 bp, Homo Sapiens
tatacagtgccaaattccaggcaggatttgcatccattgttgcaaaacatggcggaagaaataatagatggaagctatctgaatgcactgctggatctcatacagtttcaaagctcccacgtgtggacggatgacctgtcccacagagtcctggcctatctgaattcccggaatgttgccttcaccatccccagcctgcaggcagccgtggaaaaccacctggagcagcgtctgcaccagccccagaagctgctggaggacctgaggaagacagacgcccagcagttccgcactgccatgaaatgcctcttagaagacaagaaggacggcttggacctgaaagacatcatcatcgacttaggagagattcgagaacgagccttgcagagccctggcgtgaaccgcagcctgtttctcatcacactggagaggtgtttccagatgctgaactccctggagtgtgtggagatcctgggcaaggtgctgagggggtcctcagggagctttctccagccagacatcacagagcggctccctcgggacctgcgcgaggatgcctttaagaacctatctgcagtgttcaaagatctctacgacaaaacctcggctcattcccagagagctctctattcctggatgactggaatactgcagacatcctccaatgccactgatgactctgcttcatgggtcagtgcggaacacttatgggttttgggcagatacatggttcacctatcgtttgaagaaattacgaaaattagtcctatagaaattgggctgtttatcagctatgacaacgccaccaagcagctggacatggtctatgacatcacacctgagctggcccaggcgtttctggagaggatcagctcctccaactttaacatgaggaatacctccaccatccacaggctggggctgctggtttgtttctacaatgacctggaattgctggatgccactgtggctcaagtcctgctttaccagatgatcaagtgcagccacctgaggggcttccaggctggcgtccagaagctcaaagcagaactcctggacattgccatggagaaccagaccctcaatgagaccctgggttctttgtcggatgcagttgtaggtttgacctacagccaactggaatccctctcccccgaggctgtgcacggagccatctccaccctcaaccaggtctcaggttgggccaagagccaggtcatcatcttgtctgccaaatacttggcccatgagaaggtgctgtctttctacaatgtcagccagatgggcgcactgctggctggggtcagcacccaggccttctgcagcatgaaacgcaaggacatctcgcaggtcctgagaagtgccgtctcccagtatgtatccgacttgtcacctgcccagcagcaaggtatcctcagcaagatggtccaagcggaagacactgccccaggcatcgtggagatacaaggggctttctttaaggaagtgtctctctttgatttaaggaggcaacctggattcaactctacagtcctgaaggataaggaacttggaaggagccaggctctgttcctgtatgagcttctgttaaagaccaccagaaggcctgaggagcttttgagtgctgggcagctggtcaaaggcgtgacctgctcacacattgatgccatgagcactgacttctttctggcccatttccaggattttcagaacaacttcgccctgctttcaccctatcaggttaattgtttggcgtggaaatactgggaagtttccagattgtctatgccacctttcctcttggctgcactcccggcccgctacctggcttctgtcccagcctcccagtgtgtgccctttctgatcagcctggggaagagctggttggactccttggttttagattcccacaaaaagacttcagtcctcaggaaagtgcagcagtgcctggacgactccattgctgatgagtacactgtggacatcatggggaacctgctgtgtcacttgccggcagccatcatcgacagggggatctcccccagggcttgggcgactgctctacacggcctcagagactgcccagacctcaaccctgagcaaaaggctgcagtgaggctcaagctcctgggacagtatggactccctcagcactggacagccgagaccacgaaggacttgggaccctttctagtacttttctcaggagatgaattaagctctatagccacaaagtttcctgagatccttctgcaagcagcttccaagatggccaggaccctgcccactaaagaattcctctgggctgtctttcagtctgttcggaacagcagtgataagatccccagctatgaccctatgcctggttgccatggagtcgtggccccctcttctgatgacatcttcaagttggccgaagccaacgcctgctgggccctggaggacctgcggtgcatggaggaagacacattcatcaggaccgtggaactgctgggagctgtccagggtttcagccggcctcagctgatgaccctgaaggagaaagcaatacaggtttgggacatgccatcttactggagagaacaccatatcgtctccctggggcgcattgctctggctcttaatgagagtgagctggagcagctggacctcagctccatagacactgtggcttccctaagctggcaaacagaatggaccccgggacaggctgaatccattttgcaagggtacctggatgattcaggatacagtatccaggacctgaagagctttcatttggtaggacttggtgcaaccctgtgtgctataaacatcactgaaatcccacttataaagatctcagaattcagggtggtagtggccagaattgggaccctgctctgcagcacacatgtcttagccgagtttaagaggaaggctgaagttgtgtttggggatcccactgagtggaccagttctgtcttgcaggagcttgggaccattgcagctggattaactaaggcagcgctccggatgcttgacaaggatttgatgccatatttccagccatcagcaataaaatgccttcctgatgagatattcaaagagctgtccgcggagcagatcgcctccctgggtccggagaacgccgcggcggtgacccacgcccagcgccggcggctcagtccactgcagctgcagagcctccagcaggcgctagatggcgccaagactcactcctggcaggacgcgcccgctagcgccggtcccactagaacctcatcctcgcgttctcccgca

SEQ ID NO: 5677 - DNA, 1650 bp, Homo Sapiens
gccccattgtgcctgtcacagcaacttaggatgaagggggactacgtgctgggggggctgttccccctgggcgaggccgaggaggctggcctccgcagccggacacggcccagcagccctgtgtgcaccaggttctcctcaaacggcctgctctgggcactggccatgaaaatggccgtggaggagatcaacaacaagtcggatctgctgcccgggctgcgcctgggctacgacctctttgatacgtgctcggagcctgtggtggccatgaagcccagcctcatgttcctggccaaggcaggcagccgcgacatcgccgcctactgcaactacacgcagtaccagccccgtgtgctggctgtcatcgggccccactcgtcagagctcgccatggtcaccggcaagttcttcagcttcttcctcatgccccaggtcagctacggtgctagcatggagctgctgagcgcccgggagaccttcccctccttcttccgcaccgtgcccagcgaccgtgtgcagctgacggccgccgcggagctgctgcaggagttcggctggaactgggtggccgccctgggcagcgacgacgagtacggccggcagggcctgagcatcttctcggccctggccgcggcacgcggcatctgcatcgcgcacgagggcctggtgccgctgccccgtgccgatgactcgcggctggggaaggtgcaggacgtcctgcaccaggtgaaccagagcagcgtgcaggtggtgctgctgttcgcctccgtgcacgccgcccacgccctcttcaactacagcatcagcagcaggctctcgcccaaggtgtgggtggccagcgaggcctggctgacctctgacctggtcatggggctgcccggcatggcccagatgggcacggtgcttggcttcctccagaggggtgcccagctgcacgagttcccccagtacgtgaagacgcacctggccctggccaccgacccggccttctgctctgccctgggcgagagggagcagggtctggaggaggacgtggtgggccagcgctgcccgcagtgtgactgcatcacgctgcagaacgtgagcgcagggctaaatcaccaccagacgttctctgtctacgcagctgtgtatagcgtggcccaggccctgcacaacactcttcagtgcaacgcctcaggctgccccgcgcaggaccccgtgaagccctggcagctcctggagaacatgtacaacctgaccttccacgtgggcgggctgccgctgcggttcgacagcagcggaaacgtggacatggagtacgacctgaagctgtgggtgtggcagggctcagtgcccaggctccacgacgtgggcaggttcaacggcagcctcaggacagagcgcctgaagatccgctggcacacgtctgacaaccagaagcccgtgtcccggtgctcgcggcagtgccaggagggccaggtgcgccgggtcaaggggttccactcctgctgctacgactgtgtggactgcgaggcgggcagctaccggcaaaacccagacgacatcgcctgcaccttttgtggccaggatgagtggtccccggagcgaagcacacgctgcttccgccgcaggtctcggttcctggcatggggcgagccggctgtgctg

SEQ ID NO: 5678 - DNA, 924 bp, Homo Sapiens
caacctgtatactccagccgcgttgtaggtggccaggatgctgctgcagggcgctggccttggcaggtcagcctacactttgaccacaactttatctatggaggttccctcgtcagtgagaggttgatactgacagcagcacactgcatacaaccgacctggactactttttcatatactgtgtggctaggatcgattacagtaggtgactcaaggaaacgtgtgaagtactacgtgtccaaaatcgtcatccatcccaagtaccaagatacaacggcagacgtcgccttgttgaaactgtcctctcaagtcaccttcacttctgccatcctgcctatttgcttgcccagtgtcacaaagcagttggcaattccacccttttgttgggtgaccggatggggaaaagttaaggaaagttcagatagagattaccattctgcccttcaggaagcagaagtacccattattgaccgccaggcttgtgaacagctctacaatcccatcggtatcttcttgccagcactggagccagtcatcaaggaagacaagatttgtgctggtgatactcaaaacatgaaggatagttgcaagggtgattctggagggcctctgtcgtgtcacattgatggtgtatggatccagacaggagtagtaagctggggattagaatgtggtaaatctcttcctggagtctacaccaatgtaatctactaccaaaaatggattaatgccactatttcaagagccaacaatctagacttctctgacttcttgttccctattgtcctactctctctggctctcctgtgtccctcctgtgcctttggacctaacactatacacagagtaggcactgtagctgaagctgttgcttgcatacagggctgggaagagaatgcatggagatttagtcccaggggcaga

SEQ ID NO: 5679 - DNA, 3264 bp, Homo Sapiens
attagtagttggagaaattcaacagtgactggacatccatggcaggtctccctaaaatcagatgagcaccacttctgtggaggaagcttgattcaagaagatcgggttgttacagcagcacactgcctggacagcctcagtgagaagcagctgaagaatataactgtgacttctggggagtacagcctctttcagaaggataagcaagaacagaatattcctgtctcaaaaattattacccatcctgaatacaacagccgtgaatatatgagtcctgatattgcactgctgtatctaaaacacaaagtcaagtttggaaatgctgttcagccaatctgtcttcctgacagcgatgataaagttgaaccaggaattctttgcttatccagtggatggggcaagatttccaaaacatcagaatattcaaatgtcctacaagaaatggaacttcccatcatggatgacagagcgtgtaatactgtgctcaagagcatgaacctccctcccctgggaaggaccatgctgtgtgctggcttccctgattggggaatggacgcctgccagggggactctggaggaccactggtttgtagaagaggtggtggaatctggattcttgctgggataacttcctgggtagctggttgtgctggaggttcagttcccgtaagaaacaaccatgtgaaggcatcacttggcattttctccaaagtgtctgagttgatggattttatcactcaaaacctgttcacaggtttggatcggggccaacccctctcaaaagtgggctcaaggtatataacaaaggccctgagttctgtccaagaagtgaatggaagccagagaggaaagggtattttagacatggaaaagcaagttggatgtgatcatgactatgtatctttacgatcaagcagtggagtgctttttaatcagagatctctcatggaagacgatggaaaacaaaacaaacgtgtctgtggaaaaatattgccttcaccattgctggcagagaccagtgaggccatggttccatttgtttctgatacagaagacagtggcagtggctttgagcttaccgttactgctgtacagaagtcagaagcagggtcaggttgtgggagtctggctatattggtagaagaagggacaaatcactctgccaagtatcctgatttgtatcccagtaacacaaggtgtcattggttcatttgtgctccagagaagcacattataaagttgacatttgaggactttgctgtcaaatttagtccaaactgtatttatgatgctgttgtgatttacggtgattctgaagaaaagcacaagttagctaaactttgtggaatgttgaccatcacttcaatattcagttctagtaacatgacggtgatatactttaaaagtgatggtaaaaatcgtttacaaggcttcaaggccagatttaccattttgccctcagagtctttaaacaaatttgaaccaaagttacctccccaaaacaatcctgtatctaccgtaaaagctattctgcatgatgtctgtggcatccctccatttagtccccagtggctttccagaagaatcgcaggaggggaagaagcctgcccccactgttggccatggcaggtgggtctgaggtttctaggcgattaccaatgtggaggtgccatcatcaacccagtgtggattctgaccgcagcccactgtgtgcaattgaagaataatccactctcctggactattattgctggggaccatgacagaaacctgaaggaatcaacagagcaggtgagaagggccaaacacataatagtgcatgaagactttaacacactaagttatgactctgacattgccctaatacaactaagctctcctctggagtacaactcggtggtgaggccagtatgtctcccacacagcgcagagcctctattttcctcggagatctgtgctgtgaccggatggggaagcatcagtgcagatggtggcctagcaagtcgcctacagcagattcaagtgcatgtgttagaaagagaggtctgtgaacacacttactattctgcccatccaggagggatcacagagaagatgatctgtgctggctttgcagcatctggagagaaagatttctgccagggagactctggtgggccactagtatgtagacatgaaaatggtccctttgtcctctatggcattgtcagctggggagctggctgtgtccagccatggaagccgggtgtatttgccagagtgatgatcttcttggactggatccaatcaaaaatcaatggtcctgcttcacttcagacaaataataaatgcaaaaccttaaaacaacaattgccaccacccacaccttcaccagacagtgcatcttggccaggttgttgctctgaagcagagctagaaaagcctagaggcttttttcccacaccacggtatctactggattatagaggaagactggaatgttcttgggtgctcagagtttcagcaagcagtatggcaaaatttaccattgagtatctgtcactcctggggtctcctgtgtgtcaagactcagttctaattatttatgaagaaagacacagtaagagaaagacggcaggtggattacatggaagaagactttactcaatgactttcatgagtcctggaccgctggtgagggtgacattccatgcccttgtacgaggtgcatttggtataagctatattgtcttgaaagtcctaggtccaaaggacagtaaaataaccagactttcccaaagttcaaacagagagcacttggtcccttgtgaggatgttcttctgaccaagccagaagggatcatgcagatcccaagaaattctcacagaactactatgggttgccaatggagattagtagcccctttaaatcacatcattcagcttaatattattaacttcccgatgaagccaacaacttttgtctgtcatggtcatctgcgtgtttacgaaggatttggaccaggaaaaaaattaatagcttcattcgctggaactctggcaatgatactgacaaaagacatattaaaaagagaaaaactgaattttattaacacatatatcatgcatatatgggaaaattcagtgtatgataatgtaagaagtgttggaaaaagaaaacagaagaaatttgcatcaaatttaagttatagtatggaggctgagaagtccaggatccaggtgccagcagatttggtgcctgctaagggctcactttctggttct

SEQ ID NO: 5680 - DNA, 2004 bp, Homo Sapiens
ctcgacctgcccgctgggtcctgtgcctttgaagagagcacttgcggctttgactccgtgttggcctctctgccgtggattttaaatgaggaaggccattacatttatgtggatacctcctttggcaagcagggggagaaagctgtgctgctaagtcctgacttacaggctgaggaatggagctgcctccgtttggtctaccagataaccacatcttcggagtctctgtcagatcccagccagctgaacctctacatgagatttgaagatgaaagctttgatcgcttgctttggtcagctaaggaaccttcagacagctggctcatagccagcttggatttgcaaaacagttccaagaaattcaagattttaatagaaggtgtactaggacagggaaacacagccagcatcgcactatttgaaatcaagatgacaaccggctactgtattgaatgtgactttgaagaaaatcatctctgtggctttgtgaaccgctggaatcccaatgtgaactggtttgttggaggaggaagtattcggaatgtccactccattctcccacaggatcacaccttcaagagtgaactgggccactacatgtacgtggactcagtttatgtgaagcacttccaggaggtggcacagctcatctccccgttgaccacggcccccatggctggctgcctgtcattttattaccagatccagcaggggaatgacaatgtcttttccctttacactcgggatgtggctggcctttacgaggaaatctggaaagcagacaggccagggaatgctgcctggaaccttgcggaggtcgagttcaatgctccttaccccatggaggttatttttgaagttgctttcaatggtcccaagggaggttatgttgccctggatgatatttcattctctcctgttcactgccagaatcagacagaacttctgttcagtgccgtggaagccagctgcaattttgagcaagatctctgcaacttttaccaagataaagaaggtccaggttggacccgagtgaaagtaaaaccaaacatgtatcgggctggagaccacactacaggcttagggtattacctgctagccaacacaaagttcacatctcagcctggctacattggaaggctctatgggccctccctaccaggaaacttgcagtattgtctgcgttttcattatgccatctatggatttttaaaaatgagtgacaccctagcagtttacatctttgaagagaaccatgtggttcaagagaagatctggtctgtgttggagtccccaaggggtgtttggatgcaagctgaaatcacctttaagaagcccatgcctaccaaggtggttttcatgagcctatgcaaaagtttctgggactgtgggcttgtagccctggatgacattacaatacaattgggaagctgctcatcttcagagaaacttccacctccacctggagagtgtactttcgagcaagatgaatgtacatttactcaggagaaaagaaaccggagcagctggcacaggaggaggggagaaactcccacttcctacacaggaccaaagggagatcacactactggggtaggctactacatgtacattgaggcctcccatatggtgtatggacaaaaagcacgcctcttgtccaggcctctgcgaggagtctctggaaaacactgcttgacctttttctaccacatgtatggagggggcactggcctgctgagtgtttatctgaaaaaggaagaagacagtgaagagtccctcttatggaggagaagaggtgaacagagcatttcctggctacgagcactgattgaatacagctgtgagaggcaacaccagataatttttgaagccattcgaggagtatcaataagaagtgatattgccattgatgatgttaaatttcaggcaggaccctgtggagaaatggaagatacaactcaacaatcatcaggatattctgaggacttaaatgaaattgagtat

SEQ ID NO: 5681 - DNA, 651 bp, Homo Sapiens
atggcagggaggcatcagaatcgtagttttcctcttccaggagttcagtcaagtggtcaagtacatgcatttggaaattgttcagacagtgatattttggaggaggatgctgaagtgtatgagcttcgatccagaggaaaagagaaagtccgaagaagtacatcaagagatagacttgacgacattatagtattaacaaaagatatacaagaaggagatacattaaatgcaatagcccttcagtactgttgtacggtagcagatatcaagagagttaacaatctcatcagtgatcaagacttttttgcccttaggtctatcaaaattccagtaaaaaagttcagttccttgaccgaaacactttgtcctccaaaaggaagacagacttcacgtcattcatctgttcaatactcttccgaacaacaggaaattttgccagctaatgattctcttgcttacagtgactcagctggtagctttttaaaagaagtagaccgagacatagaacaaatagtaaagtgtacagacaataagagagagaacctcaatgaggtagtatcggccttaacagcacaacaaatgcgttttgaacctgataacaaaaacactcaacgtaaagacccctattatggagcagactggggaataggg

SEQ ID NO: 5682 - DNA, 3288 bp, Homo Sapiens
gcaactcccaacttcctcgcaaaccccagctccagcagccgctggattcccctccagccaatgcccgtggcctgggcctttgtgcagaagacctcggccctcctgtggctgctgcttctaggcacctccctgtcccctgcgtggggacaggccaagattcctctggaaacagtgaagctatgggctgacaccttcggcggggacctgtataacactgtgaccaaatactcaggctctctcttgctgcagaagaagtacaaggatgtggagtccagtctgaagatcgaggaggtggatggcttggagctggtgaggaagttctcagaggacatggagaacatgctgcggaggaaagtcgaggcggtccagaatctggtggaagctgccgaggaggccgacctgaaccacgaattcaatgaatccctggtgttcgactattacaactcggtcctgatcaacgagagggacgagaagggcaacttcgtggagctgggcgccgagttcctcctggagtccaatgctcacttcagcaacctgccggtgaacacctccatcagcagcgtgcagctgcccaccaacgtgtacaacaaagacccagatattttaaatggagtctacatgtctgaagccttgaatgctgtcttcgtggagaacttccagagagacccaacgttgacctggcaatattttggcagtgcaactggattcttcaggatctatccaggtataaaatggacacctgatgagaatggagtcattacttttgactgccgaaaccgcggctggtacattcaagctgctacttctcccaaggacatagtgattttggtggacgtgagcggcagtatgaaggggctgaggatgactattgccaagcacaccatcaccaccatcttggacaccctgggggagaatgacttcgttaatatcatagcgtacaatgactacgtccattacatcgagccttgttttaaagggatcctcgtccaggcggaccgagacaatcgagagcatttcaaactgctggtggaggagttgatggtcaaaggtgtgggggtcgtggaccaagccctgagagaagccttccagatcctgaagcagttccaagaggccaagcaaggaagcctctgcaaccaggccatcatgctcatcagcgacggcgccgtggaggactacgagccggtgtttgagaagtataactggccagactgtaaggtccgagttttcacttacctcattgggagagaagtgtcttttgctgaccgcatgaagtggattgcatgcaacaacaaaggctactacacgcagatctcaacgctggcggacacccaggagaacgtgatggaatacctgcacgtgctcagccgccccatggtcatcaaccacgaccacgacatcatctggacagaggcctacatggacagcaagctcctcagctcgcaggctcagagcctgacactgctcaccactgtggccatgccagtcttcagcaagaagaacgaaacgcgatcccatggcattctcctgggtgtggtgggctcagatgtggccctgagagagctgatgaagctggcgccccggtacaagcttggagtgcacggatacgcctttctgaacaccaacaatggctacatcctctcccatcccgacctccggcccctgtacagagaggggaagaaactaaaacccaaacctaactacaacagtgtggatctctccgaagtggagtgggaagaccaggctgaatctctgagaacagccatgatcaatagggaaacaggtactctctcgatggatgtgaaggttccgatggataaagggaagcgagttcttttcctgaccaatgactacttcttcacggacatcagcgacacccctttcagtttgggggtggtgctgtcccggggccacggagaatacatccttctggggaacacgtctgtggaagaaggcctgcatgacttgcttcacccagacctggccctggccggtgactggatctactgcatcacagatattgacccagaccaccggaagctcagccagctagaggccatgatccgcttcctcgccaggaaggacccagacctggagtgtgacgaggagctggtccgggaggtgctgtttgacgcggtggtgacagcccccatggaagcctactggacagcgctggccctcaacatgtccgaggagtctgaacacgtggtggacatggccttcctgggcacccgggctggcctcctgagaagcagcttgttcgtgggctccgagaaggtctccgacaggaagttcctgacacctgaggacgaggccagcgtgttcaccctggaccgcttcccgctgtggtaccgccaggcctcagagcatcctgctggcagcttcgtcttcaacctccgctgggcagaaggaccagaaagtgcgggtgaacccatggtggtgacggcaagcacagctgtggcggtgaccgtggacaagaggacagccattgctgcagccgcgggcgtccaaatgaagctggaattcctccagcgcaaattctgggcggcaacgcggcagtgcagcactgtggatgggccgtgcacacagagctgcgaggacagtgatctggactgcttcgtcatcgacaacaacgggttcattctgatctccaagaggtcccgagagacgggaagatttctgggggaggtggatggtgctgtcctgacccagctgctcagcatgggggtgttcagccaagtgactatgtatgactatcaggccatgtgcaaaccctcgagtcaccaccacagtgcagcccagcccctggtcagcccaatttctgccttcttgacggcgaccaggtggctgctgcaggagctggtgctgttcctgctggagtggagtgtctggggctcctggtacgacagaggggccgaggccaaaagtgtcttccatcactcccacaaacacaagaagcaggacccgctgcagccctgcgacacggagtaccccgtgttcgtgtaccagccggccatccgggaggccaacgggatcgtggagtgcgagccctgccagaaggtatttgtggtgcagcagattcccaacagtaacctcctcctcctggtgacagaccccacctgtgactgcagcatcttcccaccagtgctgcaggaggcgacagaagtcaaatataatgcctctgtcaaatgtgaccggatgcgctcccagaagctccgccggcgaccagactcctgccacgccttccatccagaggagaatgcccaggactgcggcggcgcctcggacacc

SEQ ID NO: 5683 - DNA, 234 bp, Homo Sapiens
catcgctcggtgtctgggctgaagcagacactgctggcggagtccgaggctctgaccagctacagccaccgggtgttctcggcctgggacttcggtctctgcggggacgtccacgtgcggctgcgccagcgcatcatcttgtacgaattaaaggtggagctggaggagacagtggtgcggcgccaggctgcggtgcggacgctgggccagcaagccagggtttggttggtgcgg

SEQ ID NO: 5684 - DNA, 3027 bp, Homo Sapiens
tctacacagggcttccacgtggaccacacggccgagctgcggggaatccggtggaccagcagtttgcggcgggagacctcggactatcaccgcacgctgacgcccaccctggaggcactgctgcactttctgctgcgacccctccagacgctgagcctgggcctggaggaggagctattgcagcgagggatccgggcaaggctgcgggagcacggcatctccctggctgcctatggcacaattgtgtcggctgagctcacagggagacataagggacccttggcagaaagagacttcaaatcaggccgctgtccagggaactccttttcctgcgggaacagccagtgtgtgaccaaggtgaacccggagtgtgacgaccaggaggactgctccgatgggtccgacgaggcgcactgcgagtgtggcttgcagcctgcctggaggatggccggcaggatcgtgggcggcatggaagcatccccgggggagtttccgtggcaagccagccttcgagagaacaaggagcacttctgtggggccgccatcatcaacgccaggtggctggtgtctgctgctcactgcttcaatgagttccaagacccgacgaagtgggtggcctacgtgggtgcgacctacctcagcggctcggaggccagcaccgtgcgggcccaggtggtccagatcgtcaagcaccccctgtacaacgcggacacggccgactttgacgtggctgtgctggagctgaccagccctctgcctttcggccggcacatccagcccgtgtgcctcccggctgccacacacatcttcccacccagcaagaagtgcctgatctcaggctggggctacctcaaggaggacttcctggtcaagccagaggtgctgcagaaagccactgtggagctgctggaccaggcactgtgtgccagcttgtacggccattcactcactgacaggatggtgtgcgctggctacctggacgggaaggtggactcctgccagggtgactcaggaggacccctggtctgcgaggagccctctggccggttctttctggctggcatcgtgagctggggaatcgggtgtgcggaagcccggcgtccaggggtctatgcccgagtcaccaggctacgtgactggatcctggaggccaccaccaaagccagcatgcctctggcccccaccatggctcctgcccctgccgcccccagcacagcctggcccaccagtcctgagagccctgtggtcagcacccccaccaaatcgatgcaggccctcagtaccgtgcctcttgactgggtcaccgttcctaagctacaagaatgtggggccaggcctgcaatggagaagcccacccgggtcgtgggcgggttcggagctgcctccggggaggtgccctggcaggtcagcctgaaggaagggtcccggcacttctgcggagcaactgtggtgggggaccgctggctgctgtctgccgcccactgcttcaaccacacgaaggtggagcaggttcgggcccacctgggcactgcgtccctcctgggcctgggcgggagcccggtgaagatcgggctgcggcgggtagtgctgcaccccctctacaaccctggcatcctggacttcgacctggctgtcctggagctggccagccccctggccttcaacaaatacatccagcctgtctgcctgcccctggccatccagaagttccctgtgggccggaagtgcatgatctccggatggggaaatacgcaggaaggaaatgccaccaagcccgagctcctgcagaaggcgtccgtgggcatcatagaccagaaaacctgtagtgtgctctacaacttctccctcacagaccgcatgatctgcgcaggcttcctggaaggcaaagtcgactcctgccagggtgactctgggggccccctggcctgcgaggaggcccctggcgtgttttatctggcagggatcgtgagctggggtattggctgcgctcaggttaagaagccgggcgtgtacacgcgcatcaccaggctaaagggctggatcctggagatcatgtcctcccagccccttcccatgtctcccccctcgaccacaaggatgctggccaccaccagccccaggacgacagctggcctcacagtcccgggggccacacccagcagacccacccctggggctgccagcagggtgacgggccaacctgccaactcaaccttatctgccgtgagcaccactgctaggggacagacgccatttccagacgccccggaggccaccacacacacccagctaccagactgtggcctggcgccggccgcgctcaccaggattgtgggcggcagcgcagcgggccgtggggagtggccgtggcaggtgagcctgtggctgcggcgccgggaacaccgttgcggggccgtgctggtggcagagaggtggctgctgtcggcggcgcactgcttcgacgtctacggggaccccaagcagtgggcggccttcctaggcacgccgttcctgagcggcgcggaggggcagctggagcgcgtggcgcgcatctacaagcacccgttctacaatctctacacgctcgactacgacgtggcgctgctggagctggcggggccggtgcgtcgcagccgcctggtgcgtcccatctgcctgcccgagcccgcgccgcgacccccggacggcacgcgctgcgtcatcaccggctggggctcggtgcgcgaaggaggctccatggcgcggcagctgcagaaggcggccgtgcgcctcctcagcgagcagacctgccgccgcttctacccagtgcagatcagcagccgcatgctgtgtgccggcttcccgcagggtggcgtggacagctgctcgggtgacgctgggggacccctggcctgcagggagccctctggacggtgggtgctaactggggtcactagctggggctatggctgtggccggccccacttcccaggtgtctatacccgggtggcagctgtgagaggctggataggacagcacatccaggag

SEQ ID NO: 5685 - DNA, 1272 bp, Homo Sapiens
catccagaccggattatttttccaaatcatgcttgtgaggaccccccagcagtgctcttagaagtgcagggcaccttacagaggcccctggtccgggacagccgcacctcccctgccaactgcacctggctcatcctgggcagcaaggaacagactgtcaccatcaggttccagaagctacacctggcctgtggctcagagcgcttaaccctacgctcccctctccagccactgatctccctgtgtgaggcacctcccagccctctgcagctgcccgggggcaacgtcaccatcacttacagctatgctggggccagagcacccatgggccagggcttcctgctctcctacagccaagattggctgatgtgcctgcaggaagagtttcagtgcctgaaccaccgctgtgtatctgctgtccagcgctgtgatggggttgatgcctgtggcgatggctctgatgaagcaggttgcagctcagaccccttccctggcctgaccccaagacccgtcccctccctgccttgcaatgtcaccttggaggacttctatggggtcttctcctctcctggatatacacacctagcctcagtctcccacccccagtcctgccattggctgctggacccccatgatggccggcggctggccgtgcgcttcacagccctggacttgggctttggagatgcagtgcatgtgtatgacggccctgggccccctgagagctcccgactactgcgtagtctcacccacttcagcaatggcaaggctgtcactgtggagacactgtctggccaggctgttgtgtcctaccacacagttgcttggagcaatggtcgtggcttcaatgccacctaccatgtgcggggctattgcttgccttgggacagaccctgtggcttaggctctggcctgggagctggcgaaggcctaggtgagcgctgctacagtgaggcacagcgctgtgacggctcatgggactgtgctgacggcacagatgaggaggactgcccaggctgcccacctggacacttcccctgtggggctgctggcacctctggtgccacagcctgctacctgcctgctgaccgctgcaactaccagactttctgtgctgatggagcagatgagagacgctgtcggcattgccagcctggcaatttccgatgccgggacgagaagtgcgtgtatgagacgtgggtgtgcgatgggcagccagactgtgcggacggcagtgatgagtgggactgctcctatgttctgccccgcaag

SEQ ID NO: 5686 - DNA, 387 bp, Homo Sapiens
aaaatctacactcgttgcaaactggcaaaaatattctcgagggctggcctggacaattactggggcttcagccttggaaactggatctgcatggcgtattatgagagcggctacaacaccacagcccagacggtcctggatgacggcagcatcgactacggcatcttccagatcaacagcttcgcgtggtgcagacgcggaaagctgaaggagaacaaccactgccacgtcgcctgctcagccttggtcactgatgacctcacagatgcgattatctgtgccaagaaaattgttaaagagacacaaggaatgaattattggcaaggctggaagaaacactgtgaggggagagacctgtccgactggaaaaaagactgtgaggtttcc

SEQ ID NO: 5687 - DNA, 801 bp, Homo Sapiens
ggcatggcggcgccacgcctcccgtcccctctcctctcagaggagggcggcgagaaccccgaagcgagcccggctccaggacctgaagcgggccccccactcaatctgtttacgtcctttccaggtgactcactgctgtgtggccgaacccctctgagaatcgtgggaggagtggacgcggaggaagggaggtggccctggcaggtgagcgtgaggaccaaaggcaggcacatctgcggcggcaccctggtcaccgccacgtgggtgctgacggcaggccactgcatttccagccgtttccattacagtgtcaagatgggagatcggagtgtctataatgaaaacacaagtgtggtggtctcagtccaaagagcttttgtccaccctaagttctcaacagttacaaccattcgaaatgaccttgcccttctccagctccaacatcctgtgaattttacctcaaacatccagcctatctgcatccctcaggagaatttccaggtggaaggtaggaccaggtgctgggtgaccggatggggcaaaacaccagaacgagagaaacttgcatcagaaattcttcaggatgtggaccaatacatcatgtgctatgaggaatgtaataagataatacagaaggccttgtcatctactaaggatgtaataataaaagggatggtctgtggctataaagaacaaggaaaggattcttgtcaaggagattctgggggccgcttggcctgtgaatataatgacacatgggtccaggtagggattgtgagctggggcatcggctgtggtcgc

SEQ ID NO: 5688 - DNA, 417 bp, Homo Sapiens
gccttgcagcctcccactgccacagtgcttgtgcagcagggcacctgcgaggtgattgcggctcaccgctgctgcaaccggaaccgcatcgaggagcgctcccagacggtgaaatgctcctgtttttctggccaggtggccggcaccacgcgggcaaagccctcctgcgtggacgacctgctcttggctgcccactgtgctcgtagagaccctagagctgcactccgcctcctgctcccacagcctccatcgtcctgcagagatggtggtgtcagatggagccctgcctgccgggggaggagtgtaaggtgctcccggacctgtcgggatggagctgcagcagtggacacaaagtcaaaaccaccaaggtcacacgatagctcttgggggtcacggcctggacaagaaaggcttgac

SEQ ID NO: 5689 - DNA, 342 bp, Homo Sapiens
atgctactctgccatggatcccttcagcacactttccagcagcatcacctgcacagaccagaaggagggacgtgtgaagtgatagcagcacaccgatgttgtaacaagaatcgcattgaggagcggtcacaaacagtaaagtgttcctgtctacctggaaaagtggctggaacaacaagaaaccggccttcttgcgtcgatgcctccatagtgattgggaaatggtggtgtgagatggagccttgcctagaaggagaagaatgtaagacactccctgacaattctggatggatgtgcgcaacaggcaacaaaattaagaccacgagaattcacccaagaacc

SEQ ID NO: 5690 - DNA, 534 bp, Homo Sapiens
cagacagatggccggaacggctacacggcggtcatcgaagtgaccagcgggggtccctggggcgactgggcctggcctgagatgtgtcccgatggattcttcgccagcgggttctcgctcaaggtggagcctccccaaggcattcctggcgacgacactgcactgaatgggatcaggctgcactgcgcgcgcgggaacgtcctaggcaatacgcacgtggtagagtcccagtctggaagctggggcgaatggagtgagccgctgtggtgtcgcggcggcgcctacctagtggctttctcgcttcgcgtggaggcacccacgaccctcggtgacaacacagcagcgaacaacgtgcgcttccgctgttcagacggcgaggaactgcaggggcctgggctgagctggggagactttggagactggagtgaccattgccccaagggcgcgtgcggcctgcagaccaagatccagggacctagaggcctcggcgatgacactgcgctgaacgacgcgcgcttattctgctgccgcagt

SEQ ID NO: 5691 - DNA, 219 bp, Homo Sapiens
aaaaagatggctaagaactcccgcacgagtcttgccagtgcttccaatgaaaactataccttctgctggcgggtgttctgtgcctgggattacctcattggaaacccagaggctgcagagagcaaaacagctgccatagtgaacagcatcagggaagctatattggaagaacaggagaaaaagaaaagcaaaaacctggcagtgaccatctgcctgagg

SEQ ID NO: 5692 - DNA, 843 bp, Homo Sapiens
gagtcgttggtgaagtttttcattcctcagaggagaaaatctgtggctggggagattgttctcattactggagctgggcatggaataggcaggcagactacttatgaatttgcaaaacgacagagcatattggttctgtgggatattaataagcgcggtgtggaggaaactgcagctgagtgccgaaaactaggcgtcactgcgcatgcgtatgtggtagactgcagcaacagagaagagatctatcgctctctaaatcaggtgaagaaagaagtgggtgatgtaacaatcgtggtgaataatgctgggacagtatatccagccgatcttctcagcaccaaggatgaagagattaccaagacatttgaggtcaacatcctaggacatttttggatcacaaaagcacttcttccatcgatgatggagagaaatcatggccacatcgtcacagtggcttcagtgtgcggccacgaagggattccttacctcatcccatattgttccagcaaatttgccgctgttggctttcacagaggtctgacatcagaacttcaggccttgggaaaaactggtatcaaaacctcatgtctctgcccagtttttgtgaatactgggttcaccaaaaatccaagcacaagattatggcctgtattggagacagatgaagtcgtaagaagtctgatagatggaatacttaccaataagaaaatgatttttgttccatcgtatatcaatatctttctgagactacagaagtttcttcctgaacgcgcctcagcgattttaaatcgtatgcagaatattcaatttgaagcagtggttggccacaaaatcaaaatgaaa

SEQ ID NO: 5693 - DNA, 219 bp, Homo Sapiens
ggtgggtcaaaatgtgtgagtaacaccccaggatactgcaggacatgttgccactggggggagacagcattgttcatgtgcaacgcttccagaaaatgctgcatcagctactccttcctgccgaagcctgacctaccacagctcatcggtaaccactggcaatcaaggagaagaaacacacaaaggaaagacaagaagcaacaaacgaccgtaacatca

SEQ ID NO: 5694 - DNA, 579 bp, Homo Sapiens
tcataccccttcagtcactcaatgaagcctcacctacatccacgcctgtaccacggctgctatggggacatcatgaccatgaagacctctggggccacttgtgatgcaaacagtgtgatgaactgcgggatccgtggttctgaaatgtttgctgagatggatttgagggccataaaaccttaccagactctgatcaaagaagtcgggcagagacattgcgtggaccctgctgtcatcgcagccatcatctccagggaaagccatggcggatctgtcctgcaagacggctgggaccacaggggacttaaatttggcttgatgcagcttgataaacaaacgtaccaccctgtcggtgcctgggatagcaaagagcacctttcacaggctactgggattctaacagagagaattaaggcaatccagaaaaaattccccacgtggagtgttgctcagcacctcaaaggtggtctctcagcttttaagtcaggaattgaagcgattgccaccccatcggacatagacaatgacttcgtcaatgatatcattgctcgagctaagttctataaaagacaaagcttc

SEQ ID NO: 5695 - DNA, 309 bp, Homo Sapiens
ctcgcgtctggtcgcctacccctcgcggtccactccgcccagcatggacctggatccggggcgccttggttgcgaattgccaggagggccctgagatttgtgttgtcaaaacactggggggatgattgttacctgacaaaccgcctctggcaggacctgaagcctcccagtcacgtcgagaacgggcaggagctcaggttggcgccgccggtgcagtgggcattacaggtgcaagggaaccagttgcaaactgcagtgctgtgcttgaggatggctcctcctgagccggcaggctcccgccaaagaatt

SEQ ID NO: 5696 - DNA, 1134 bp, Homo Sapiens
ctggcagttgagaagacttactattatcaaggtgattttcatatttctggagtcacatacaatgataattgtgaaaacgcagcttcacaagccagcacaaatctaagcaaagatattgagactaagatgttaaatgcatttcaaaattccagtatatataaggaatatgtcaaatctgaggtcatcaaacttctgcctaatgccaatggttcaaatgtgcagttacagctgaaattcaagtttcctccagcagaaggagttagcatgaggactaaaatcaaggctaaattacatcagatgttgaaaaacaacatggcatcctggaatgcagttcctgcttccattaaactcatggaaatcagcaaggctgcttctgaaatgcttaccaacaactgttgtgggagacaagtagccaacagtatcataactggcaacaaaattgtgaatggaaaaagctccctggagggggcatggccatggcaggccagcatgcaatggaaaggccgtcactactgtggagcctctctgatcagcagcaggtggctattatctgcagctcactgctttgctaagaaaaataattcaaaagattggactgtcaactttggagttgtagtaaataaaccatatatgacacggaaagtccaaaacattatttttcatgaaaattatagcagtcctgggcttcatgatgatattgcccttgtgcagcttgctgaagaagtttcttttacagagtacattcgtaagatttgtcttcctgaagccaaaatgaagctctcagaaaatgacaatgttgtagttacaggttggggaacactttatatgaatggttcatttccagtgatacttcaagaagcctttttgaagattattgacaacaaaatttgcaatgcctcatatgcatactctggctttgtgactgattcaatgttatgtgctggatttatgtcaggagaagctgatgcatgtcagaatgattctggtggaccactagcttaccctgattccagaaatatctggcatcttgttggaatagtaagctggggtgatggatgtggtaaaaagaataagccaggtgtctatactcgagtgacttcttatcgcaattggattacatccaagactggactc

SEQ ID NO: 5697 - DNA, 981 bp, Homo Sapiens
accagacaggactatgaagagctagaaaagcagctgaaagaagtctttaaggagcgaagcaccattcttcgtcagctgacaaagacatcaagagaacttgatggaattaaagtcaatcttcagtccttaaaaaacgatgagcagtctgccaaaactgatgttcagaaacttctggaattaggacagaaacaaagagaagaaatgaagtctcttcaggaggccctgcaaaatcagcttaaggagacatcagagaaagcagaaaaacaccaggctactattaattttttaaagactgaagttgaaagaaagagcaaaatgatccgagacctccagaatgagaataaaagcttgaaaaacaaactcttgtcaggaaacaagctctgtggcattcacgcagaagagtcaaaaaaaatccaagcccagctgaaggagcttcgttatgggaagaaggatttattatttaaggcgcagcagcttactgatctggaacaaaaattagctgtagccaaaaatgaactggagaaagcagctcttgacagggagtcacagatgaaagcaatgaaagagactgtgcagctctgcttgacatctgttttccgtgatcagcctcctccccctttgagtttaatcacatcaaatccaactcggatgttactcccacccaggaatattgcctctaagcttccagatgcagcggccaaaagcaagcctcaacaaagtgcttctggaaacaatgagagctctcaagttgagtcaacaaaggaaggaaatccaagtaccactgcctgtgactctcaagatgagggcagaccgtgttccatgaagcacaaagaaagtcccccaagtaatgccactgcagaaaccgagcctatcccacagaaattgcaaatgcctccttgctctgaatgtgaggtgaaaaaagccccagaaaaaccattgaccagctttgaagggatggcagctagagaagaaaaaatactg

SEQ ID NO: 5698 - DNA, 1518 bp, Homo Sapiens
gcctctggcatctacttctacagtaacaagtacttggaccctaatgactttggcgctgtcagggtgggcagagcagttgctacgacggctgtcatcagttacgactacctcacttccctgaagagtgtcccttatggctcagaggagtacttgcagctgagatctaaggtgcaccttcgctctgccaggcgtctctgtgagctctgctgtgccaaccggggcaccttcatcaaggtgggccagcacctgggggctctggactacctgttgccagaggagtacaccagcacgctgaaggtactgcacagccaggctccacagagcagcatgcaagagatccgccaggtcatccgagaagatctgggcaaggagatccatgatttgttccagagcttcgatgacacccctctggggacggcctccctggcccaggtccacaaggcagtgctgcatgatgggcggacggtggccgtgaaggtccagcacccaaaggtgcgggctcagagctcgaaggacattctcctgatggaggtgctcgttctggctgtgaagcagctgttcccagagtttgagtttatgtggcttgtggatgaagccaagaagaacctgcctttggagctggatttcctcaatgaagggaggaatgctgagaaggtgtcccagatgctcaggcattttgacttcttgaaggtcccccgaatccactgggacctgtccacggagcgggtcctcctgatggagtttgtggatggcgggcaggtcaatgacagagactacatggagaggaacaagatcgacgtcaatgagatctcacgccacctgggcaagatgtatagtgagatgatcttcgtcaatggcttcgtgcactgcgatccccaccccggcaatgtactggtgcggaagcaccccggcacgggaaaggcggagattgtcctgttggaccatgggctttaccagatgctcacggaagaattccgcctgaattactgccacctctggcagtctctgatctggactgacatgaagagagtgaaggagtacagccagcgactgggagccggggatctctaccccttgtttgcctgcatgctgacggcgcgatcgtgggactcggtcaacagaggcatcagccaagctcccgtcactgccactgaggacttagagattcgcaacaacgcggccaactacctcccccagatcagccatctcctcaaccacgtgccgcgccagatgctgctcatcttgaagaccaacgacctgctgcgtggcattgaggccgccctgggcacccgcgccagcgccagctcctttctcaacatgtcacgttgctgcatcagagcgctagctgagcacaagaagaagaatacctgttcattcttcagaaggacccagatctctttcagcgaggccttcaacttatggcagatcaacctccatgagctcatcctgcgtgtgaaggggttgaagctggctgaccgggtcttggccctaatatgctggctgttccctgctccactc

SEQ ID NO: 5699 - DNA, 2241 bp, Homo Sapiens
ttccccaaaatagaaaggaggagggagatagcacatgttcatgcggaaaaagggcagtccgataagatgaacaccgatgacctagaaaatagctctgttacctcaaagcagactccccaactggtggtctctgaagatccaatgatgatgtcagcagtaccatcggcaacatcattaaataaagcattctcgattaacaaagaaatccagcctggacaagctgggctcatgcaaacagaacgccctggtgtttccacacctactgagtcaggtgtcccctcagctgaagaagtatttggttccagccagccagagagaatatctcctgaaagtggacttgccaaggccatgttaaccattgctatcactgcgactccttctctgactgttgatgaaaaggaggaactccttacaagcactaactttcagcccattgtagaagagatcacagaaaccacaaaaggttttctgaagtatatggataatcaatcatttgcaactgaaagtcaggaaggagttggtttgggacattcaccttcatcctatgtgaatactaaggaaatgctaaccaccaatccaaagactgagaaatttgaagcagacacagaccacaggacaacttcttttcctggtgctgagtccacagcaggcagtgagcctggaagcctcacccctgataaggagaagccttcgcagatgacagctgataacacccaggctgctgccaccaagcaaccactcgaaacttccgagtacaccctgagtgttgagccagaaactgatagtctgctgggagccccagaagtcacagtgagtgtcagcacagctgttccagctgcctctgccttaagtgatgagtgggatgacaccaaattagagagtgtaagccggataaggacccccaagcttggagacaatgaagagactcaggtgagaacggagatgtctcagacagcacaagtaagccatgagggtatggaaggaggccagccttggacagaggctgcacaggtggctctggggctgcctgaaggggaaacacacacgggcacagccctgctaatagcgcatgggaatgagagatcacctgctttcactgatcaaagttcctttacccccacaagtctgatggaagacatgaaagtttccattgtgaacttgctccaaagtacgggagacttcacggaatccaccaaggaaaacgatgccctgtttttcttagaaaccactgtttctgtctctgtatatgagtctgaggcagaccaactgttgggaaatacaatgaaagacatcatcactcaagagatgacaacagctgttcaagagccagatgccactttatccatggtgacacaagagcaggttgctaccctcgagcttatcagagacagtggcaagactgaggaagaaaaggaggacccctctcctgtgtctgacgttcctggtgttactcagctgtcaagaagatgggagcctctggccactacaatttcaactacagtcgtccctttgtcttttgaagttactcccactgtggaagaacaaatggacacagtcacagggccaaatgaggagttcacaccagttctgggatctccagtgacacctcctggaataatggtgggggaacccagcatttcccctgcacttcctgctttggaggcatcctctgagagaagaactgttgttccatctattactcgtgttaatacagctgcctcatatggcctggaccaacttgaatctgaagagggagaagaagatgaggatgaagaggatgaagaagatgaagatgaagaagaggaagatgaggaagaagatgaggaagataaagatgcagactcgctggatgagggcttggatggtgacactgagctgccaggttttaccctccctggtatcacatcccaggaaccaggcttagaggagggaaacatggacctgttggagggagctacctaccaggtgccagatgccctcgagtgggaacagcagaatcaaggcctggtgagaagctggatggaaaaattaaaagacaaggctggttacatgtctgggatgctggtgcctgtaggggttgggatagctggagccttgttcatcttgggagccctctacagcattaaggttatgaatcgccgaaggagaaatggcttcaaaaggcataaaagaaagcagagagaattcaacagcatgcaagatcgagtaatgctcttagccgacagctctgaagatgaattt

SEQ ID NO: 5700 - DNA, 1209 bp, Homo Sapiens
cagccccttcttgcccatggagataaaagtctgcaggggcctcaaccccccaggcatcagctctcagagccagcccccgcctaccacagaatcacacccaccattaccaattttgctttgcgtttgtataaagagctggcagcagacgcccccggaaacatcttcttctcgccagtgagcatctccaccaccctggccctgctctctcttggggcccaagctaacacctcagctctgatcctggagggcctgggattcaacctcacagaaacccctgaagccgacatccaccagggcttccggagcctcctccacacccttgccctgcccagccccaaactcgaactaaaagtaggaaactccctgttcctagacaagcgactaaagcctcggcagcactatttggacagcatcaaggagctttatggagcttttgctttttctgccaacttcacagattctgttacaactgggaggcagattaatgactatttgagaaggcaaacatacgggcaagtcgtggactgcctcccggagttcagccaggacacgttcatggttcttgccaattacatcttcttcaaagccaagtggaagcaccctttcagtcgctaccagacccagaagcaggaaagtttctttgtggatgagaggacttctctccaggtccccatgatgcaccaaaaggaaatgcacagattcctctatgaccaggatttggcttgcaccgtcctccagatagaatacagaggaaatgccttggcgctgctggtcctccctgacccggggaaaatgaagcaggtggaggctgctctgcagccacagaccctgagaaaatggggccaattgctcctgcccagtctgttggatttgcacttgccaaggttttcaatttctggaacatataacctggaagacatacttccccaaattggtctcaccaacatactcaacttagaagctgacttctcaggagtcactgggcagctcaacaaaaccatctccaaggtgtcacacaaggcgatggtggacatgagtgagaaggggaccgaggccggggctgcttcaggcctcctctcccagcccccatctctgaacaccatgtcagacccacatgcccacttcaacaggcctttcctcttgctcctttgggaggtcaccacccagagcttactcttcctgggaaaagttgtcaacccagttgcaggg

SEQ ID NO: 5701 - DNA, 738 bp, Homo Sapiens
gcgccggccgagctgcgggtccgcgtgcggctgccggacggccaggtgaccgaggagagcctgcaggcggacagcgacgcggacagcatcagcctcgagctgcgcaagcccgacggcaccctcgtctccttcaccgccgacttcaagaaggatgtgaaggtcttccgggccctgatcctgggggagctggagaaggggcagagtcagttccaggccctctgctttgtcacccagctgcagcacaatgagatcatccccagtgaggccatggccaagctccggcagaaaaatccccgggcagtgcggcaggcggaggaggttcggggtctggagcatctgcacatggatgtcgctgtcaacttcagccagggggccctgctgagcccccatctccacaacgtgtgtgccgaggccgtggatgccatctacacccgccaggaggatgtccggttctggctggagcaaggtgtggacagttctgtgttcgaggctctgcccaaggcctcagagcaggcggagctgcctcgctgcaggcaggtgggggaccacgggaagccctgcgtctgccgctatggcctgagcctggcctggtacccctgcatgctcaagtactgccacagccgcgaccggcccacgccctacaagtgtggcatccgcagctgccagaagagctacagcttcgacttctacgtgccccagaggcagctgtgtctctgggatgaggatccctacccaggc

SEQ ID NO: 5702 - DNA, 1257 bp, Homo Sapiens
gtctcctttggtatccgcaaactctacatgaaaagtctgttaaaaatctttgcgtgggctaccttgagaatggagcgaggagccaaggagaagaaccaccagctttacaagccctacaccaacggaatcattgcaaaggatcccacttcactagaagaagagatcaaagagattcgtcgaagtggtagtagtaaggctctggacaacactccagagttcgagctctctgacattttctacttttgccggaaaggaatggagaccattatggatgatgaggtgacaaagagattctcagcagaagaactggagtcctggaacctgctgagcagaaccaattataacttccagtacatcagccttcggctcacggtcctgtgggggttaggagtgctgattcggtactgctttctgctgccgctcaggatagcactggctttcacagggattagccttctggtggtgggcacaactgtggtgggatacttgccaaatgggaggtttaaggagttcatgagtaaacatgttcacttaatgtgttaccggatctgcgtgcgagcgctgacagccatcatcacctaccatgacagggaaaacagaccaagaaatggtggcatctgtgtggccaatcatacctcaccgatcgatgtgatcatcttggccagcgatggctattatgccatggtgggtcaagtgcacgggggactcatgggtgtgattcagagagccatggtgaaggcctgcccacacgtctggtttgagcgctcggaagtgaaggatcgccacctggtggctaagagactgactgaacatgtgcaagataaaagcaagctgcctatcctcatcttcccagaaggaacctgcatcaataatacatcggtgatgatgttcaaaaagggaagttttgaaattggagccacagtttaccctgttgctatcaagtatgaccctcaatttggcgatgccttctggaacagcagcaaatacgggatggtgacgtacctgctgcgaatgatgaccagctgggccattgtctgcagcgtgtggtacctgcctcccatgactagagaggcagatgaagatgctgtccagtttgcgaatagggtgaaatctgccattgccaggcagggaggacttgtggacctgctgtgggatgggggcctgaagagggagaaggtgaaggacacgttcaaggaggagcagcagaagctgtacagcaagatgatcgtggggaaccacaaggacaggagccgctcc

SEQ ID NO: 5703 - DNA, 381 bp, Homo Sapiens
agtcccgcgctgcaggatctgcaagccacggaggccaattgcacggtgctgtcggtgcagcagatcggcgaggtgttcgagtgcaccttcacctgtggcgccgactgcaggggcacctcgcagtacccctgcgtccaggtctacgtgaacaactctgagtccaactctagggcgctgctgcacagcgacgagcaccagctcctgaccaaccccaagtgctcctatatccctccctgtaagagagaaaatcagaagaatttggaaagtgtcatgaattggcaacagtactggaaagatgagattggttcccagccatttacttgctattttaatcaacatcaaagaccagatgatgtgcttctgcatcgcactcatgatgag

SEQ ID NO: 5704 - DNA, 1182 bp, Homo Sapiens
gccaatgcccccagtgcatacccccgcccttcctccacaaagagcacccctgcctcacaggtgtattccctcaacaccgactttgccttccgcctataccgcaggctggttttggagaccccgagtcagaacatcttcttctcccctgtgagtgtctccacttccctggccatgctctcccttggggcccactcagtcaccaagacccagattctccagggcctgggcttcaacctcacacacacaccagagtctgccatccaccagggcttccagcacctggttcactcactgactgttcccagcaaagacctgaccttgaagatgggaagtgccctcttcgtcaagaaggagctgcagctgcaggcaaatttcttgggcaatgtcaagaggctgtatgaagcagaagtcttttctacagatttctccaacccctccattgcccaggcgaggatcaacagccatgtgaaaaagaagacccaagggaaggttgtagacataatccaaggccttgaccttctgacggccatggttctggtgaaccacattttctttaaagccaagtgggagaagccctttcaccctgaatatacaagaaagaacttcccattcctggtgggcgagcaggtcactgtgcatgtccccatgatgcaccagaaagagcagttcgcttttggggtggatacagagctgaactgctttgtgctgcagatggattacaagggagatgccgtggccttctttgtcctccctagcaagggcaagatgaggcaactggaacaggccttgtcagccagaacactgagaaagtggagccactcactccagaaaaggtggatagaggtgttcatccccagattttccatttctgcctcctacaatctggaaaccatcctcccgaagatgggcatccaaaatgtctttgacaaaaatgctgatttttctggaattgcaaagagagactccctgcaggtttctaaagcaacccacaaggctgtgctggatgtcagtgaagagggcactgaggccacagcagctaccaccaccaagttcatagtccgatcgaaggatggcccctcttacttcactgtctccttcaataggaccttcctgatgatgattacaaataaagccacagacggtattctctttctagggaaagtggaaaatcccactaaatcc

SEQ ID NO: 5705 - DNA, 195 bp, Homo Sapiens
gtgaccagttctaccagttacttcctaccttactggctctttggatcccagatggggaagccagtgtcattcagcacattccggaggtgcaactaccctgtgcggggagagggacacagtctgatcatggtggaagaatgtgggcgctatgccagcttcaatgccatcccaagcctggcctggcagatgtgcaca

SEQ ID NO: 5706 - DNA, 912 bp, Homo Sapiens
gaccactactcgccctctggaaggcacaggctcggcccctcgccggaaccggcggctagttcccagcaggctgaggccgtccgcaagaggctccggcggcggagggagggaggggcgcatgcaaaggattgtggaacagcaccgcttaaggatgtgttgcaagggtctcggattatagggggcaccgaagcacaagctggcgcatggccgtgggtggtgagcctgcagattaaatatggccgtgttcttgttcatgtatgtgggggaaccctagtgagagagaggtgggtcctcacagctgcccactgcactaaagacgctagcgatcctttaatgtggacagctgtgattggaactaataatatacatggacgctatcctcataccaagaagataaaaattaaagcaatcattattcatccaaacttcattttggaatcttatgtaaatgatattgcactttttcacttaaaaaaagcagtgaggtataatgactatattcagcctatttgcctaccttttgatgttttccaaatcctggacggaaacacaaagtgttttataagtggctggggaagaacaaaagaagaaggtaacgctacaaatattttacaagatgcagaagtgcattatatttctcgagagatgtgtaattctgagaggagttatgggggaataattcctaacacttcattttgtgcaggtgatgaagatggagcttttgatacttgcaggggtgacagtgggggaccattaatgtgctacttaccagaatataaaagattttttgtaatgggaattaccagttacggacatggctgtggtcgaagaggttttcctggtgtctatattgggccatccttctaccaaaagtggctgacagagcatttcttccatgcaagcactcaaggc

SEQ ID NO: 5707 - DNA, 492 bp, Homo Sapiens
tacgaggtttttaacatcatcagcccaagcaacaatggtggcaatgttcaggagacagtgacaattgataatgaaaaaaataccgccatcattaacatccatgcaggatcatgctcttctaccacaatttttgactataaacatggctacattgcatccagggtgctctcccgaagagcctgctttatcctgaagatggaccatcagaacatccctcctctgaacaatctccaatggtacatctatgagaaacaggctctggacaacatgttctccagcaaatacacctgggtcaagtacaaccctctggagtctctgatcaaagacgtggattggttcctgcttgggtcacccattgagaaactctgcaaacatatccctttgtataagggggaagtggttgaaaacacacataatgtcggtgctggaggctgtgcaaaggctgggctcctgggcatcttgggaatttcaatctgtgcagacattcatgtt

SEQ ID NO: 5708 - DNA, 1302 bp, Homo Sapiens
caggtcactggagttctggatgattgcttgtgtgatattgacagcatcgataacttcaatacctacaaaatcttccccaaaataaaaaaattgcaagagagagactattttcgttattacaaggttaatctgaagcgaccttgtcctttctgggcagaagatggccactgttcaataaaagactgtcatgtggagccctgtccagagagtaaaattccggttggaataaaagctgggcattctaataagtacttgaaaatggcaaacaataccaaagaattagaagtttgtgagcaagctaataaactgggagcaattaacagcacattaagtaatcaaagcaaagaagctttcattgactgggcaagatatgatgattcacgggatcacttttgtgaacttgatgatgagagatctccagctgctcagtatgtagacctattgctgaacccagagcgttacactggctataaagggacctctgcatggagagtgtggaacagcatctatgaagagaactgtttcaagcctcgatctgtttatcgtcctttaaatcctctggcgcctagccgaggcgaagatgatggagaatcattctacacatggctagaaggtttgtgtctggagaaaagagtcttctataagcttatatcgggacttcatgctagcatcaatttacatctatgcgcaaattatcttttggaagaaacctggggtaagcccagttggggacctaatattaaagaattcaaacaccgctttgaccctgtggaaaccaagggagaaggtccaagaaggctcaagaatctttactttttatacttgattgagcttcgagctttgtcaaaggtggctccatattttgagcgctcaattgtcgatctttacactggaaatgcagaagaagatgctgacacaaaaactcttctactgaatatctttcaagatacaaagtcctttcccatgcactttgatgagaaatccatgtttgcaggtgacaaaaaaggggccaagtcactaaaggaggaattccgattacatttcaagaatatctcccgtataatggactgtgttggatgtgacaaatgcagattatggggaaaattacagactcagggtttaggaactgccctgaagatattattctctgaaaaagaaatccaaaagcttccagagaatagtccatctaaaggcttccaactcacccgacaggaaatagttgctcttttaaatgcttttggaaggctttctacaagtataagagacttacagaattttaaagtcttattacaacacagtagg

SEQ ID NO: 5709 - DNA, 327 bp, Homo Sapiens
gccagcacaggccagccagaagatgacactgagactacaggtttggaaggcggcgttgccatgccaggtgccgaagatgatgtggtgactccaggaaccagcgaagaccgctataagtctggcttgacaactctggtggcaacaagtgtcaacagtgtaacaggcattcgcatcgaggatctgccaacttcagaaagcacagtccacgcgcaagaacaaagtccaagcgccacagcctcaaacgtggccaccagtcactccacggagaaagtggatggagacacacagacaacagttgagaaagatggtttgtcaacagtgaccctg

SEQ ID NO: 5710 - DNA, 2988 bp, Homo Sapiens
atgaagccaggctgtgcggcaggatctccagggaatgaatggattttcttcagcactgatgaaataaccacacgctataggaatacaatgtccaacgggggattgcaaagatctgtcatcctgtcagcacttattctgctacgagctgttactggattctctggagatggaagagctatatggtctaaaaatcctaattttactccggtaaatgaaagtcagctgtttctctatgacactttccctaaaaactttttctggggtattgggactggagcattgcaagtggaagggagttggaagaaggatggaaaaggaccttctatatgggatcatttcatccacacacaccttaaaaatgtcagcagcacgaatggttccagtgacagttatatttttctggaaaaagacttatcagccctggattttataggagtttctttttatcaattttcaatttcctggccaaggcttttccccgatggaatagtaacagttgccaacgcaaaaggtctgcagtactacagtactcttctggacgctctagtgcttagaaacattgaacctatagttactttataccactgggatttgcctttggcactacaagaaaaatatggggggtggaaaaatgataccataatagatatcttcaatgactatgccacatactgtttccagatgtttggggaccgtgtcaaatattggattacaattcacaacccatatctagtggcttggcatgggtatgggacaggtatgcatgcccctggagagaagggaaatttagcagctgtctacactgtgggacacaacttgatcaaggctcactcgaaagtttggcataactacaacacacatttccgcccacatcagaagggttggttatcgatcacgttgggatctcattggatcgagccaaaccggtcggaaaacacgatggatatattcaaatgtcaacaatccatggtttctgtgcttggatggtttgccaaccctatccatggggatggcgactatccagaggggatgagaaagaagttgttctccgttctacccattttctctgaagcagagaagcatgagatgagaggcacagctgatttctttgccttttcttttggacccaacaacttcaagcccctaaacaccatggctaaaatgggacaaaatgtttcacttaatttaagagaagcgctgaactggattaaactggaatacaacaaccctcgaatcttgattgctgagaatggctggttcacagacagtcgtgtgaaaacagaagacaccacggccatctacatgatgaagaatttcctcagccaggtgcttcaagcaataaggttagatgaaatacgagtgtttggttatactgcctggtctctcctggatggctttgaatggcaggatgcttacaccatccgccgaggattattttatgtggattttaacagtaaacagaaagagcggaaacctaagtcttcagcacactactacaaacagatcatacgagaaaatggtttttctttaaaagagtccacgccagatgtgcagggccagtttccctgtgacttctcctggggtgtcactgaatctgttcttaagcccgagtctgtggcttcgtccccacagttcagcgatcctcatctgtacgtgtggaacgccactggcaacagactgttgcaccgagtggaaggggtgaggctgaaaacacgacccgctcaatgcacagattttgtaaacatcaaaaaacaacttgagatgttggcaagaatgaaagtcacccactaccggtttgctctggattgggcctcggtccttcccactggcaacctgtccgcggtgaaccgacaggccctgaggtactacaggtgcgtggtcagtgaggggctgaagcttggcatctccgcgatggtcaccctgtattatccgacccacgcccacctaggcctccccgagcctctgttgcatgccgacgggtggctgaacccatcgacggccgaggccttccaggcctacgctgggctgtgcttccaggagctgggggacctggtgaagctctggatcaccatcaacgagcctaaccggctaagtgacatctacaaccgctctggcaacgacacctacggggcggcgcacaacctgctggtggcccacgccctggcctggcgcctctacgaccggcagttcaggccctcacagcgcggggccgtgtcgctgtcgctgcacgcggactgggcggaacccgccaacccctatgctgactcgcactggagggcggccgagcgcttcctgcagttcgagatcgcctggttcgccgagccgctcttcaagaccggggactaccccgcggccatgagggaatacattgcctccaagcaccgacgggggctttccagctcggccctgccgcgcctcaccgaggccgaaaggaggctgctcaagggcacggtcgacttctgcgcgctcaaccacttcaccactaggttcgtgatgcacgagcagctggccggcagccgctacgactcggacagggacatccagtttctgcaggacatcacccgcctgagctcccccacgcgcctggctgtgattccctggggggtgcgcaagctgctgcggtgggtccggaggaactacggcgacatggacatttacatcaccgccagtggcatcgacgaccaggctctggaggatgaccggctccggaagtactacctagggaagtaccttcaggaggtgctgaaagcatacctgattgataaagtcagaatcaaaggctattatgcattcaaactggctgaagagaaatctaaacccagatttggattcttcacatctgattttaaagctaaatcctcaatacaattttacaacaaagtgatcagcagcaggggcttcccttttgagaacagtagttctagatgcagtcagacccaagaaaatacagagtgcactgtctgcttattccttgtgcagaagaaacca

SEQ ID NO: 5711 - DNA, 669 bp, Homo Sapiens
tcccgcgggccagcgcactacgagatgctgggtcgctgccgcatggtgtgcgacccgcatgggccccgtggccctggtcccgacggcgcgcctgcttccgtgccccccttcccgccaggcgccaagggagaggtgggccggcgcgggaaagcaggcctgcgggggccccctggaccaccaggtccaagagggcccccaggagaacccggcaggccaggccccccgggccctcccggtccaggtccgggcggggtggcgcccgctgccggctacgtgcctcgcattgctttctacgcgggcctgcggcggccccacgagggttacgaggtgctgcgcttcgacgacgtggtgaccaacgtgggcaacgcctacgaggcagccagcggcaagtttacttgccccatgccaggcgtctacttcttcgcttaccacgtgctcatgcgcggcggcgacggcaccagcatgtgggccgacctcatgaagaacggacaggtccgggccagcgccattgctcaggacgcggaccagaactacgactacgccagcaacagcgtcattctgcacctggacgtgggcgacgaggtcttcatcaagctggacggcgggaaagtgcacggcggcaacaccaacaagtacagcaccttctccggcttcatcatctaccccgac

SEQ ID NO: 5712 - DNA, 2271 bp, Homo Sapiens
gggtacaaggcggaggtgatggtcagccaggtgtactcaggcagtctgcgtgtactcaatcgccacttctcccaggatcttacccgccgggaatctagtgccttccgcagtgaaaccgccaaagcccagaagatgctcaaggagctcatcaccagcacccgcctgggaacttactacaactccagctccgtctattcctttggggagggacccctcacctgcttcttctggttcattctccaaatccccgagcaccgccggctgatgctgagccccgaggtggtgcaggcactgctggtggaggagctgctgtccacagtcaacagctcggctgccgtcccctacagggccgagtacgaagtggaccccgagggcctagtgatcctggaagccagtgtgaaagacatagctgcattgaattccacgctgggttgttaccgctacagctacgtgggccagggccaggtcctccggctgaaggggcctgaccacctggcctccagctgcctgtggcacctgcagggccccaaggacctcatgctcaaactccggctggagtggacgctggcagagtgccgggaccgactggccatgtatgacgtggccgggcccctggagaagaggctcatcacctcggtgtacggctgcagccgccaggagcccgtggtggaggttctggcgtcgggggccatcatggcggtcgtctggaagaagggcctgcacagctactacgaccccttcgtgctctccgtgcagccggtggtcttccaggcctgtgaagtgaacctgacgctggacaacaggctcgactcccagggcgtcctcagcaccccgtacttccccagctactactcgccccaaacccactgctcctggcacctcacggtgccctctctggactacggcttggccctctggtttgatgcctatgcactgaggaggcagaagtatgatttgccgtgcacccagggccagtggacgatccagaacaggaggctgtgtggcttgcgcatcctgcagccctacgccgagaggatccccgtggtggccacggccgggatcaccatcaacttcacctcccagatctccctcaccgggcccggtgtgcgggtgcactatggcttgtacaaccagtcggacccctgccctggagagttcctctgttctgtgaatggactctgtgtccctgcctgtgatggggtcaaggactgccccaacggcctggatgagagaaactgcgtttgcagagccacattccagtgcaaagaggacagcacatgcatctcactgcccaaggtctgtgatgggcagcctgattgtctcaacggcagcgacgaagagcagtgccaggaaggggtgccatgtgggacattcaccttccagtgtgaggaccggagctgcgtgaagaagcccaacccgcagtgtgatgggcggcccgactgcagggacggctcggatgaggagcactgtgactgtggcctccagggcccctccagccgcattgttggtggagctgtgtcctccgagggtgagtggccatggcaggccagcctccaggttcggggtcgacacatctgtgggggggccctcatcgctgaccgctgggtgataacagctgcccactgcttccaggaggacagcatggcctccacggtgctgtggaccgtgttcctgggcaaggtgtggcagaactcgcgctggcctggagaggtgtccttcaaggtgagccgcctgctcctgcacccgtaccacgaagaggacagccatgactacgacgtggcgctgctgcagctcgaccacccggtggtgcgctcggccgccgtgcgccccgtctgcctgcccgcgcgctcccacttcttcgagcccggcctgcactgctggattacgggctggggcgccttgcgcgagggcgccctacgggcggatgctgtggccctattttatggatggagaaaccaaggctcagagacatgttgctgccccatcagcaacgctctgcagaaagtggatgtgcagttgatcccacaggacctgtgcagcgaggtctatcgctaccaggtgacgccacgcatgctgtgtgccggctaccgcaagggcaagaaggatgcctgtcagggtgactcaggtggtccgctggtgtgcaaggcactcagtggccgctggttcctggcggggctggtcagctggggcctgggctgtggccggcctaactacttcggcgtctacacccgcatcacaggtgtgatcagctggatccagcaagtggtgacc

SEQ ID NO: 5713 - DNA, 156 bp, Homo Sapiens
tgcactgccgtgcccgtgagcgcactgggcaacggcagcctggcacccggccttcctgcccccgagctcgcccgcctgctggcccgggtgccctgccctgagatctacgatggcgactggctgttggcccgagaggtggccgtgcgttacctccgc

SEQ ID NO: 5714 - DNA, 621 bp, Homo Sapiens
ggagaacatgcaaaagagggagaatgccctccccataagaacccatgcaaagagctgtgccagggtgatgaattgtgtccggctgaacagaagtgctgcaccacaggctgtggtcggatctgccgagacattcctaaggggaggaaaagagattgccctagggttattcggaaacaatcctgtttgaaaaggtgcatcactgatgagacatgtccaggtgtaaagaaatgctgcacgcttggctgcaacaagagctgtgtagtcccaatctctaaacagaagctggcagagtttggtggtgaatgtcccgctgacccccttccgtgtgaggagctgtgtgatggggatgcatcctgtccccaggggcataaatgctgcagcaccggctgtggccgcacctgcctcggagacattgagggagggcggggcggtgattgtccaaaagttctggtgggcctgtgcattgttggctgtgtgatggatgagaattgtcaagctggagaaaaatgttgcaagtcaggctgtggccgcttctgtgtcccaccagtcctgcccccaaaactgaccatgaaccccaactggactgtgaggtctgattccgaattagagatcccggtgccc

SEQ ID NO: 5715 - DNA, 777 bp, Homo Sapiens
tacgtgatcgtgagctccgtgtcttgggccgtcaccaacgaggtggacgaggagctggacagcgcctccactgaggaggctatgcccgcgctgctagaggattcgggcagcatctggcagcaaagcttccccgcctctgcccacaaggaggacgcgcacctgcggccccgggcgggcgccgcccgggccaggcagccccccgcgccacccgggatgttctcctaccggcgcgagggcggccagacggccagtgcgcccccgggccctagactgcgcgccgccaccgcccgctccctggcccatgccagcgtctggggctgcctggccaccgtgtccacccacaagaagatccaaggactgccatttgggaactgcctgcccgtcagtgatggccccttcaacaatagcactgggattcctttcttctacatgacagccaaggaccccgtggtggctgatctgatgaagaaccccatggcctcgctgatgctgccagaatcagaaggggagttctgcagaaaaaacatcgttgatccggaagatccccgatgtgtccagttaacgctcactggccagatgatcgcagtgtctccagaagaagtagaatttgccaagcaagccatgttttcaaggcacccagggatgaggaagtggcctcgtcaatatgaatggttctttatgaagatgaggatagaacatatctggcttcagaaatggtatggaggcgcatccagtatttcaagggaggaatatttcaaagcagttcccagaaaggcc

SEQ ID NO: 5716 - DNA, 1224 bp, Homo Sapiens
ctgagcccccagcccggagcaggtcacgatgagggcccaggctctggatgggctgccaaagggaccgtgcggggctggaaccggagagcccgagagagccctgggcatgtgtcagagccggacaggacccagctgagccaggacctgggtgggggcaccctggccatggacacgctgccagataacaggaccagggtggtggaggacaaccacagctattatgtgtcccgtctctatggccccagcgagccccacagccgggaactgtgggtagatgtggccgaggccaaccggagccaagtgaagatccacacaatactctccaacacccaccggcaggcttcgagagtggtcttgtcctttgatttccctttctacgggcatcctctgcggcagatcaccatggcaactggaggcttcatcttcatgggggacgtgatccatcggatgctcacagctactcagtatgtggcgcccctgatggccaacttcaaccctggctactccgacaactccacagttgtttactttgacaatgggacagtctttgtggttcagtgggaccacgtttatctccaaggctgggaagacaagggcagtttcaccttccaggcagctctgcaccatgacggccgcattgtctttgcctataaagagatccctatgtctgtcccggaaatcagctcctcccagcatcctgtcaaaaccggcctatcggatgccttcatgattctcaatccatccccggatgtgccagaatctcggcgaaggagcatctttgaatatcaccgcatagagctggaccccagcaaggtcaccagcatgtcggccgtggagttcaccccattgccgacctgcctgcagcataggagctgtgacgcctgcatgtcctcagacctgaccttcaactgcagctggtgccatgtcctccagagatgctccagtggctttgaccgctatcgccaggagtggatggactatggctgtgcacaggaggcagagggcaggatgtgcgaggacttccaggatgaggaccacgactcagcctcccctgacacttccttcagcccctatgatggagacctcaccactacctcctcctccctcttcatcgacagcctcaccacagaagatgacaccaagttgaatccctatgcaggaggagacggccttcagaacaacctgtcacccaagacaaagggcactcctgtgcacctgggcacc

SEQ ID NO: 5717 - DNA, 2148 bp, Homo Sapiens
gagccccccggcctgacccagctgtccccgggggcgcccccgcaggcccccgacttgctctacgctgacgggctgcgcgcctacgcggccggggcttgggcgccggccgtggcgctgctgcgggaggcgctgcggagccaggcggcgctgggccgggtgcggctggattgcggggcgagctgcgcggccgatccgggcgccgcgctccccgccgtgcttctcggggccccggagcccgactccgggccgggacccacgcaggggtcctgggagcgacagcttctccgtgcagcgctccgccgcgcagactgcctgacccagtgcgcagcacggaggctgggccccgggggcgcggcgcggcttcgcgtggggagcgcgctccgggacgccttccgccgtcgggagccctacaactacctgcagagggcctattaccagttgaagaagctggatctggcagctgcggcagcacacaccttctttgtagcaaaccccatgcacctgcagatgcgggaggacatggctaagtacagacgaatgtcgggagttcggccccagagcttccgggacctggagacgcccccacactgggcagcctatgacactggcctggagctactggggcgccaggaggcaggactggcactgcccaggctagaggaggctcttcaggggagcctggcccagatggagagctgccgtgctgactgtgaggggcctgaggagcagcagggggctgaagaagaggaggatggggctgcgagccaggggggcctctatgaggccattgcaggacactggattcaggtcctgcagtgccggcaacgctgtgtgggggaaacagccacacgccctggtcgcagcttccctgtcccagacttccttcccaaccagctgaggcggctacatgaggcccatgctcaggtgggcaatctgtcccaggctatagaaaatgtcctgagtgtcctgctcttctacccggaggatgaggctgccaagagggctctgaaccagtaccaggcccagctgggagagccgagacctggcctcggacccagagaggacatccagcgcttcatcctccgatccctgggggagaagaggcagctctactatgccatggagcacctggggaccagcttcaaggatcctgacccctggacccctgcagctctcatccctgaggcacttagagaaaagctcagagaggatcaagagaagaggccttgggaccatgagcccgtgaagccaaagcccttgacctactggaaggatgtccttctcctggagggtgtgaccttgacccaggattccaggcagctgaatgggtcggagcgggcggtgttggatgggctgctcaccccagccgagtgtggggtgctgctgcagctggctaaggatgcagctggggctggagccaggtctggctatcgtggtcgccgctcccctcacaccccccatgaacgcttcgaggggctcacggtgcttaaggctgcgcagctggcccgggctgggacagtgggcagtcagggtgctaagctgcttctggaggtgagcgagcgggtgcggaccttgacccaggcctacttctccccggaacggcccctgcatctgtccttcacccacctggtgtgccgcagcgccatagaaggagagcaagagcagcgcatggacctgagtcacccagtgcacgcagacaactgcgtcctggaccctgacacgggagagtgctggcgggagcccccagcctacacctatcgggactacagcggactcctctacctcaacgatgacttccagggtggggacctgttcttcacggagcccaacgccctcactgtcacggctcgggtgcgtcctcgctgtgggcgccttgtggccttcagctccggtgtcgagaatccccatggggtgtgggccgtgactcggggacggcgctgtgccctggcactgtggcacacgtgggcacctgagcacagggagcaggagtggatagaagccaaagaactgctgcaggagtcacaggaggaggaggaagaggaagaggaagaaatgcccagcaaagacccttccccagagccccctagccgcaggcaccagagggtccaagacaagactggaagggcacctcgggttcgggaggagctg

SEQ ID NO: 5718 - DNA, 996 bp, Homo Sapiens
tatgatagatccttagcccaacacagacaagagattgtggacaagtcagtgagtccatggagcctggagacgtattcctataacatataccaccccatgggagagatctatgagtggatgagagagatcagtgagaagtacaaggaagtggtgacacagcatttcctaggagtgacctatgagacccaccccatatattatctgaagatcagccaaccatctggtaatcccaagaaaatcatttggatggactgtggaattcacgccagagaatggattgctcctgctttttgccaatggttcgtcaaagaaattctacaaaaccataaagacaactcaaggatacgcaagctccttaggaacctggacttctatgtccttccagttcttaacatagatggttatatctacacttggacaactgatcgtctttggaggaaatcccgttcaccccataataatggcacatgttttgggacggatctcaatcgaaatttcaatgcttcttggtgtagtattggtgcctctagaaactgccaagatcaaacattctgtgggacagggccagtgtctgaaccagagactaaagctgttgccagcttcatagagagcaagaaggatgatattttgtgcttcctgaccatgcactcttatgggcagttaattctcacaccttacggctacaccaaaaataaatcaagtaaccacccagaaatgattcaagttggacagaaggcagcaaatgcattgaaagcaaagtatggaaccaattatagagttggatcgagtgcagatattttatatgcctcatcagggtcttcaagagattgggcccgagacattgggattcccttctcatatacgtttgagctgagggacagtggaacatatgggtttgttctgccagaagctcagatccagcccacctgtgaggagaccatggaggctgtgctgtcagtcctggatgatgtgtatgcgaaacactggcactcggac

SEQ ID NO: 5719 - DNA, 321 bp, Homo Sapiens
ctggagaacttcactgcattcatacctggccatcgctgctgggtccacatcctggacaatgacactgtctctgacaatgacactggggccctcagccaagatgcactcttgagaatctccatcccactggactcaaacatgaggccagagaagtgtcgtcgctttgttcatcctcagtggcagctccttcacctgaatgggaccttccccaacacaagtgacgcagacatggagccctgtgtggatggctgggtgtatgacagaatctccttctcatccaccatcgtgactgagtgggatctggtatgtgactctcaatca

SEQ ID NO: 5720 - DNA, 732 bp, Homo Sapiens
ggctgcgccgaggccgggcgctgctgtcccggccgggaccccgcctgcttcgcccgcggctggaggctggacagggtctacgggacgtgtttctgcgaccaagcctgtcgcttcaccggggactgctgcttcgactacgacagggcgtgcccagctcgcccgtgcttcgtgggggaatggagcccctggagtggttgtgcagaccagtgcaagcctacaacccgtgtgcggaggcgctcggtgcagcaggagcctcagaacggcggggcgccctgcccacccctggaagagagagctggctgcctggagtactccaccccgcagggccaggactgcgggcacacctatgttcctgcctttataactacctctgcattcaacaaggagagaacacgacaagctacgtctccacactggtctacacacacagaggatgctggatactgtatggagtttaagacagagtccttgactcctcactgtgctctggaaaactggcccttgactagatggatgcagtatctccgagagggatacacggtgtgtgtggattgtcagcctccagctatgaactctgtgagccttcgttgttctggagatggcctggactccgatggaaatcagactctccattggcaagcaattggtaatcctcggtgtcaaggaacttggaaaaaagttcggcgagtagaccagtgttcttgtccagctgttcacagttttatttttata

SEQ ID NO: 5721 - DNA, 1182 bp, Homo Sapiens
ctaaagccgagcttctcaccaaggaattataaagctttgagcgaggtccaaggatggaagcaaaggatggcagccaaggagcttgcaaggcagaacatggacttaggctttaagctgctcaagaagctggccttttacaaccctggcaggaacatcttcctatcccccttgagcatctctacagctttctccatgctgtgcctgggtgcccaggacagcaccctggacgagatcaagcaggggttcaacttcagaaagatgccagaaaaagatcttcatgagggcttccattacatcatccacgagctgacccagaagacccaggacctcaaactgagcattgggaacacgctgttcattgaccagaggctgcagccacagcgtaagtttttggaagatgccaagaacttttacagtgccgaaaccatccttaccaactttcagaatttggaaatggctcagaagcagatcaatgactttatcagtcaaaaaacccatgggaaaattaacaacctgatcgagaatatagaccccggcactgtgatgcttcttgcaaattatattttctttcgagccaggtggaaacatgagtttgatccaaatgtaactaaagaggaagatttctttctggagaaaaacagttcagtcaaggtgcccatgatgttccgtagtggcatataccaagttggctatgacgataagctctcttgcaccatcctggaaataccctaccagaaaaatatcacagccatcttcatccttcctgatgagggcaagctgaagcacttggagaagggattgcaggtggacactttctccagatggaaaacattactgtcacgcagggtcgtagacgtgtctgtacccagactccacatgacgggcaccttcgacctgaagaagactctctcctacataggtgtctccaaaatctttgaggaacatggtgatctcaccaagatcgcccctcatcgcagcctgaaagtgggcgaggctgtgcacaaggctgagctgaagatggatgagaggggtacggaaggggccgctggcaccggagcacagactctgcccatggagacaccactcgtcgtcaagatagacaaaccctatctgctgctgatttacagcgagaaaataccttccgtgctcttcctgggaaagattgttaaccctattggaaaa

SEQ ID NO: 5722 - DNA, 1812 bp, Homo Sapiens
agcaccctggtccctctgcggctccgccatcgacagctggggctgcaggccaagggctggaacttcatgctggaggattccaccttctggatcttcgggggctccatccactatttccgtgtgcccagggagtactggagggaccgcctgctgaagatgaaggcctgtggcttgaacaccctcaccacctatgttccgtggaacctgcatgagccagaaagaggcaaatttgacttctctgggaacctggacctggaggccttcgtcctgatggccgcagagatcgggctgtgggtgattctgcgtccaggcccctacatctgcagtgagatggacctcgggggcttgcccagctggctactccaagaccctggcatgaggctgaggacaacttacaagggcttcaccgaagcagtggacctttattttgaccacctgatgtccagggtggtgccactccagtacaagcgtgggggacctatcattgccgtgcaggtggagaatgaatatggttcctataataaagaccccgcatacatgccctacgtcaagaaggcactggaggaccgtggcattgtggaactgctcctgacttcagacaacaaggatgggctgagcaaggggattgtccagggagtcttggccaccatcaacttgcagtcaacacacgagctgcagctactgaccacctttctcttcaacgtccaggggactcagcccaagatggtgatggagtactggacggggtggtttgactcgtggggaggccctcacaatatcttggattcttctgaggttttgaaaaccgtgtctgccattgtggacgccggctcctccatcaacctctacatgttccacggaggcaccaactttggcttcatgaatggagccatgcacttccatgactacaagtcagatgtcaccagctatgactatgatgctgtgctgacagaagccggcgattacacggccaagtacatgaagcttcgagacttcttcggctccatctcaggcatccctctccctcccccacctgaccttcttcccaagatgccgtatgagcccttaacgccagtcttgtacctgtctctgtgggacgccctcaagtacctgggggagccaatcaagtctgaaaagcccatcaacatggagaacctgccagtcaatgggggaaatggacagtccttcgggtacattctctatgagaccagcatcacctcgtctggcatcctcagtggccacgtgcatgatcgggggcaggtgtttgtgaacacagtatccataggattcttggactacaagacaacgaagattgctgtccccctgatccagggttacaccgtgctgaggatcttggtggagaatcgtgggcgagtcaactatggggagaatattgatgaccagcgcaaaggcttaattggaaatctctatctgaatgattcacccctgaaaaacttcagaatctatagcctggatatgaagaagagcttctttcagaggttcggcctggacaaatggagttccctcccagaaacacccacattacctgctttcttcttgggtagcttgtccatcagctccaccccttgtgacacctttctgaagctggagggctgggagaagggggttgtattcatcaatggccagaaccttggacgttactggaacattggaccccagaagacgctttacctcccaggtccctggttgagcagcggaatcaaccaggtcatcgtttttgaggagacgatggcgggccctgcattacagttcacggaaaccccccacctgggcaggaaccagtacattaag

SEQ ID NO: 5723 - DNA, 1974 bp, Homo Sapiens
gtgcccccgcgccgggactactgcgtgctgggcgctgggcccgcgggcctgcagatggcctacttcctgcagcgcgctggacgcgactacgcagtgttcgagcgggccccgcggcccggcagcttcttcacacgctacccgcggcaccgcaagctcatcagcatcaacaagcggtacacgggcaaggctaacgccgagttcaacctccgccacgactggaactctctgctcagccacgacccccggctgctcttcagacactactcgcgtgcctacttccccgacgcccgcgacatggtgcgctacctgggtgacttcgcggacacgctggggctccgtgtccagtacaacaccaccatcgcccacgtcactctggacaaggaccgacaggcctggaatggccactacttcatcctaactgaccagaagggccaggtgcatcagtgcagcgtcctctttgtagccactggtttatcagtccccaaccaggttgacttccctggctccgaatatgcagagggttacgagtccgtgtccgtggaccctgaggactttgtaggccagaatgtgctgatcctgggtcgtgggaactcggcctttgagacagcagagaacatcttgggtgtcacaaactttatccatatgctcagccgctcccgggtccgtctgtcctgggccacccactacgttggagacctcagagccatcaacaatggcctgctggatacctaccagctcaagtccctggacgggctgctcgagtctgacctgacggatctggccatcctgaaggacagcaaaggcaagttccatgtcaccccgaaattcttcctggaagaagccaacaccaaccagagtgccgactccatcaccctcccccaggacgacaatgacaactttgccatgcgcgtgccctatgaccgggtaatccgctgcctgggctggaactttgacttctccattttcaataagtccctcagacttaactcgggaaatgcattcggcaagaagtacccgctgattcgagctagctacgaatccaaaggaagccggggtctgtttatcctgggtactgccagccactcggtggactaccggaaatctgctgggggcttcatccacggattccgatacacagtgcgtgctgttcaccggctcctggagcaccgccaccacagcgtcacctggcccgccactgagctccccatcacacagctgaccagctccatcgtgcggcgcgtgaatgaggcttctgggctctaccagatgttcggtgtgctggccgatgtcatcctgttgaaggagaattccacggcctttgagtacctggaggagttccccatacagatgctggcccagctggagacactcacagggaggaaggcaaagcacgggctcttcgtcatcaacatggaatatggcagaaatttctctggccccgacaaggacgtcttctttgatgaccggtctgtggggcacacagaagatgcctggcagtctaactttcttcatcctgtcatctactactatagatacctccccaccgaacaggaggtgaggttccgccctgcacactggcccctgcctcggcccacggccatccatcacatcgtggaagacttcttaacagactggactgccccgatcgggcacatcctacctctgaggcgcttcctggagaactgtttggacaccgatttgcgaagcttctatgcagagtcctgcttcctgttcgccctcacgcgccagaagttgccacccttttgccagcaggggtacctgaggatgcagggactcgtgagtaccgagagcctttggcagcacagagtggagagcaggctcctgcgggactatgcccccacaggcaggcgcctggaggacagcagccagcagcttggcgaccaagagccactaggttcccccctggctccagggcctctggctcagtccgtcgatagcaacaaagaggagctc

SEQ ID NO: 5724 - DNA, 2538 bp, Homo Sapiens
ttcctgtcgcaccaccgcctgaaaggcaggtttcagagggaccgcaggaacatccgccccaacatcatcctggtgctgacggacgaccaggatgtggagctgggttccatgcaggtgatgaacaagacccggcgcatcatggagcagggcggggcgcacttcatcaacgccttcgtgaccacacccatgtgctgcccctcacgctcctccatcctcaccggcaagtacgtccacaaccacaacacctacaccaacaatgagaactgctcctcgccctcctggcaggcacagcacgagagccgcacctttgccgtgtacctcaatagcactggctaccggacagctttcttcgggaagtatcttaatgaatacaacggctcctacgtgccacccggctggaaggagtgggtcggactccttaaaaactcccgcttttataactacacgctgtgtcggaacggggtgaaagagaagcacggctccgactactccaaggattacctcacagacctcatcaccaatgacagcgtgagcttcttccgcacgtccaagaagatgtacccgcacaggccagtcctcatggtcatcagccatgcagccccccacggccctgaggattcagccccacaatattcacgcctcttcccaaacgcatctcagcacatcacgccgagctacaactacgcgcccaacccggacaaacactggatcatgcgctacacggggcccatgaagcccatccacatggaattcaccaacatgctccagcggaagcgcttgcagaccctcatgtcggtggacgactccatggagacgatttacaacatgctggttgagacgggcgagctggacaacacgtacatcgtatacaccgccgaccacggttaccacatcggccagtttggcctggtgaaagggaaatccatgccatatgagtttgacatcagggtcccgttctacgtgaggggccccaacgtggaagccggctgtctgaatccccacatcgtcctcaacattgacctggcccccaccatcctggacattgcaggcctggacatacctgcggatatggacgggaaatccatcctcaagctgctggacacggagcggccggtgaatcggtttcacttgaaaaagaagatgagggtctggcgggactccttcttggtggagagaggcaagctgctacacaagagagacaatgacaaggtggacgcccaggaggagaactttctgcccaagtaccagcgtgtgaaggacctgtgtcagcgtgctgagtaccagacggcgtgtgagcagctgggacagaagtggcagtgtgtggaggacgccacggggaagctgaagctgcataagtgcaagggccccatgcggctgggcggcagcagagccctctccaacctcgtgcccaagtactacgggcagggcagcgaggcctgcacctgtgacagcggggactacaagctcagcctggccggacgccggaaaaaactcttcaagaagaagtacaaggccagctatgtccgcagtcgctccatccgctcagtggccatcgaggtggacggcagggtgtaccacgtaggcctgggtgatgccgcccagccccgaaacctcaccaagcggcactggccaggggcccctgaggaccaagatgacaaggatggtggggacttcagtggcactggaggccttcccgactactcagccgccaaccccattaaagtgacacatcggtgctacatcctagagaacgacacagtccagtgtgacctggacctgtacaagtccctgcaggcctggaaagaccacaagctgcacatcgaccacgagattgaaaccctgcagaacaaaattaagaacctgagggaagtccgaggtcacctgaagaaaaagcggccagaagaatgtgactgtcacaaaatcagctaccacacccagcacaaaggccgcctcaagcacagaggctccagtctgcatcctttcaggaagggcctgcaagagaaggacaaggtgtggctgttgcgggagcagaagcgcaagaagaaactccgcaagctgctcaagcgcctgcagaacaacgacacgtgcagcatgccaggcctcacgtgcttcacccacgacaaccagcactggcagacggcgcctttctggacactggggcctttctgtgcctgcaccagcgccaacaataacacgtactggtgcatgaggaccatcaatgagactcacaatttcctcttctgtgaatttgcaactggcttcctagagtactttgatctcaacacagacccctaccagctgatgaatgcagtgaacacactggacagggatgtcctcaaccagctacacgtacagctcatggagctgaggagctgcaagggttacaagcagtgtaacccccggactcgaaacatggacctgggacttaaagatggaggaagctatgagcaatacaggcagtttcagcgtcgaaagtggccagaaatgaagagaccttcttccaaatcactgggacaactgtgggaaggctgggaaggt

SEQ ID NO: 5725 - DNA, 2547 bp, Homo Sapiens
tcgactgtcagatccccgaggttcagaggacggatacagcaggaacgaaaaaacatccgacccaacattattcttgtgcttaccgatgatcaagatgtggagctggggtccctgcaagtcatgaacaaaacgagaaagattatggaacatgggggggccaccttcatcaatgcctttgtgactacacccatgtgctgcccgtcacggtcctccatgctcaccgggaagtatgtgcacaatcacaatgtctacaccaacaacgagaactgctcttccccctcgtggcaggccatgcatgagcctcggacttttgctgtatatcttaacaacactggctacagaacagtcttttttggaaaatacctcaatgaatataatggcagctacatcccccctgggtggcgagaatggcttggattaatcaagaattctcgcttctataattacactgtttgtcgcaatggcatcaaagaaaagcatggatttgattatgcaaaggactacttcacagacttaatcactaacgagagcattaattacttcaaaatgtctaagagaatgtatccccataggcccgttatgatggtgatcagccacgctgcgccccacggccccgaggactcagccccacagttttctaaactgtaccccaatgcttcccaacacataactcctagttataactatgcaccaaatatggataaacactggattatgcagtacacaggaccaatgctgcccatccacatggaatttacaaacattctacagcgcaaaaggctccagactttgatgtcagtggatgattctgtggagaggctgtataacatgctcgtggagacgggggagctggagaatacttacatcatttacaccgccgaccatggttaccatattgggcagtttggactggtcaaggggaaatccatgccatatgactttgatattcgtgtgcctttttttattcgtggtccaagtgtagaaccaggatcaatagtcccacagatcgttctcaacattgacttggcccccacgatcctggatattgctgggctcgacacacctcctgatgtggacggcaagtctgtcctcaaacttctggacccagaaaagccaggtaacaggtttcgaacaaacaagaaggccaaaatttggcgtgatacattcctagtggaaagaggcaaatttctacgtaagaaggaagaatccagcaagaatatccaacagtcaaatcacttgcccaaatatgaacgggtcaaagaactatgccagcaggccaggtaccagacagcctgtgaacaaccggggcagaagtggcaatgcattgaggatacatctggcaagcttcgaattcacaagtgtaaaggacccagtgacctgctcacagtccggcagagcacgcggaacctctacgctcgcggcttccatgacaaagacaaagagtgcagttgtagggagtctggttaccgtgccagcagaagccaaagaaagagtcaacggcaattcttgagaaaccaggggactccaaagtacaagcccagatttgtccatactcggcagacacgttccttgtccgtcgaatttgaaggtgaaatatatgacataaatctggaagaagaagaagaattgcaagtgttgcaaccaagaaacattgccaagcgtcatgatgaaggccacaaggggccaagagatctccaggcttccagtggtggcaacaggggcaggatgctggcagatagcagcaacgccgtgggcccacctaccactgtccgagtgacacacaagtgttttattcttcccaatgactctatccattgtgagagagaactgtaccaatcggccagagcgtggaaggaccataaggcatacattgacaaagagattgaagctctgcaagataaaattaagaatttaagagaagtgagaggacatctgaagagaaggaagcctgaggaatgtagctgcagtaaacaaagctattacaataaagagaaaggtgtaaaaaagcaagagaaattaaagagccatcttcacccattcaaggaggctgctcaggaagtagatagcaaactgcaacttttcaaggagaacaaccgtaggaggaagaaggagaggaaggagaagagacggcagaggaagggggaagagtgcagcctgcctggcctcacttgcttcacgcatgacaacaaccactggcagacagccccgttctggaacctgggatctttctgtgcttgcacgagttctaacaataacacctactggtgtttgcgtacagttaatgagacgcataattttcttttctgtgagtttgctactggctttttggagtattttgatatgaatacagatccttatcagctcacaaatacagtgcacacggtagaacgaggcattttgaatcagctacacgtacaactaatggagctcagaagctgtcaaggatataagcagtgcaacccaagacctaagaatcttgatgttggaaataaagatggaggaagctatgacctacacagaggacagttatgggatggatgggaaggt

SEQ ID NO: 5726 - DNA, 243 bp, Homo Sapiens
aagaatgctgagatgtccaaggagctgctgggctttaaaagggagctttggaatgtctcaaactccgtacaagcatgcgaagagagacagaagagaggctgggattccgttcagcagagcatcaccatggtcaggagcaagattgatagattagagacgacattagcaggcataaaaaacattgacacaaaggtacagaaaatcttggaggtgctgcagaaaatgccacagtcctcacctcaa

SEQ ID NO: 5727 - DNA, 393 bp, Homo Sapiens
agtgaggccaagctctacggtcgttgtgaactggccagagtgctacatgacttcgggctggacggataccggggatacagcctggctgactgggtctgccttgcttatttcacaagcggtttcaacgcagctgctttggactacgaggctgatgggagcaccaacaacgggatcttccagatcaacagccggaggtggtgcagcaacctcaccccgaacgtccccaacgtgtgccggatgtactgctcagatttgttgaatcctaatctcaaggataccgttatctgtgccatgaagataacccaagagcctcagggtctgggttactgggaggcctggaggcatcactgccagggaaaagacctcactgaatgggtggatggctgtgacttc

SEQ ID NO: 5728 - DNA, 2283 bp, Homo Sapiens
gatcaggatttttacagtttacttggagtgtccaaaactgcaagcagtagagaaataagacaagctttcaagaaattggcattgaagttacatcctgataaaaacccgaataacccaaatgcacatggcgattttttaaaaataaatagagcatatgaagtactcaaagatgaagatctacggaaaaagtatgacaaatatggagaaaagggacttgaggataatcaaggtggccagtatgaaagctggaactattatcgttatgattttggtatttatgatgatgatcctgaaatcataacattggaaagaagagaatttgatgctgctgttaattctggagaactgtggtttgtaaatttttactccccaggctgttcacactgccatgatttagctcccacatggagagactttgctaaagaagtggatgggttacttcgaattggagctgttaactgtggtgatgatagaatgctttgccgaatgaaaggagtcaacagctatcccagcctcttcatttttcggtctggaatggccccagtgaaatatcatggagacagatcaaaggagagtttagtgagttttgcaatgcagcatgttagaagtacagtgacagaactttggacaggaaattttgtcaactccatacaaactgcttttgctgctggtattggctggctgatcactttttgttcaaaaggaggagattgtttgacttcacagacacgactcaggcttagtggcatgttggatggtcttgttaatgtaggatggatggactgtgccacccaggataacctttgtaaaagcttagatattacaacaagtactactgcttattttcctcctggagccactttaaataacaaagagaaaaacagtattttgtttctcaactcattggatgctaaagaaatatatttggaagtaatacataatcttccagattttgaactactttcggcaaacacactagaggatcgtttggctcatcatcggtggctgttattttttcattttggaaaaaatgaaaattcaaatgatcctgagctgaaaaaactaaaaactctacttaaaaatgatcatattcaagttggcaggtttgactgttcctctgcaccagacatctgtagtaatctgtatgtttttcagccgtctctagcagtatttaaaggacaaggaaccaaagaatatgaaattcatcatggaaagaagattctatatgatatacttgcctttgccaaagaaagtgtgaattctcatgttaccacgcttggacctcaaaattttcctgccaatgacaaagaaccatggcttgttgatttctttgccccctggtgtccaccatgtcgagctttactaccagagttacgaagagcatcaaatcttctttatggtcagcttaagtttggtacactagattgtacagttcatgagggactctgtaacatgtataacattcaggcttatccaacaacagtggtattcaaccagtccaacattcatgagtatgaaggacatcactctgctgaacaaatcttggagttcatagaggatcttatgaatccttcagtggtctcccttacacccaccaccttcaacgaactagttacacaaagaaaacacaacgaagtctggatggttgatttctattctccgtggtgtcatccttgccaagtcttaatgccagaatggaaaagaatggcccggacattaactggactgatcaacgtgggcagtatagattgccaacagtatcattctttttgtgcccaggaaaacgttcaaagataccctgagataagattttttcccccaaaatcaaataaagcttatcagtatcacagttacaatggttggaatagggatgcttattccctgagaatctggggtctaggatttttacctcaagtatccacagatctaacacctcagactttcagtgaaaaagttctacaagggaaaaatcattgggtgattgatttctatgctccttggtgtggaccttgccagaattttgctccagaatttgagctcttggctaggatgattaaaggaaaagtgaaagctggaaaagtagactgtcaggcttatgctcagacatgccagaaagctgggatcagggcctatccaactgttaagttttatttctacgaaagagcaaagagaaattttcaagaagagcagataaataccagagatgcaaaagcaatcgctgccttaataagtgaaaaattggaaactctccgaaatcaaggcaagaggaataaggatgaactt

SEQ ID NO: 5729 - DNA, 315 bp, Homo Sapiens
atggcccacccggtgcagtccgagtttccttcagcacaggagtcaggctccgccgcatccctggacctgccagagatggagatactcctcaccaaggcagagaacaaggatgacaagaccctgaatctgtccaagaccctctcggggcctctggatctggagcagaacggccagggcctacccttcaaggccatctccgaggggcacctggaggccccactgcctcggtccccctcccgggccagctcaaggagggcgtcctccatcgccaccacctcctatgcccaagaccaagaagcccccagagattacctc

SEQ ID NO: 5730 - DNA, 441 bp, Homo Sapiens
tcttcatcctcccctcgaaccccaccagccccagcccgccccccgtgtgccaggggaggcccctcggccccacgtcatgtgtgcgtgtgggagcgagcacctccaccaagccgatctcctcgggtcccaagatcacgtcggcaagtcctgcctggcactgcacccccagccaccccatcaggctttgaggaggggccgccctcatcccaatacccctgggctatcgtgtggggtcccaccgtgtctcgagaggatggaggggaccccaactctgccaatcccggatttctggactatggttttgcagcccctcatgggctcgcaaccccacaccccaactcagactccatgcgaggtgatggagatgggcttatccttggagaggcacctgccaccctgcggccattcctgttcgggggccgtggggaaggtgtggacccc

SEQ ID NO: 5731 - DNA, 1797 bp, Homo Sapiens
cgcttcgtcgccgagcgggactcggaggacgacggagaggagccggtggttttcccggagtcgcccctgcagagccccacggtgctcgtggcggtcctcgcccgcaacgcggcgcacacgctgccgcacttcctcggctgcctggagcggctggactaccccaagagcaggatggccatctgggcagccactgatcacaatgtggataatacaacagaaatattcagggagtggttgaaaaatgtacagagactctatcactatgtggagtggaggcctatggatgaaccagagtcttaccctgatgaaattggaccaaagcactggccaacctcccggtttgcccatgtgatgaaactacgacaggcagcccttcgaactgcgagggaaaaatggtcagactacattctgttcatagatgttgacaatttcctgactaatccacagaccctcaatctactgattgcagaaaacaaaactattgtggcccccatgctggagtctcggggcctgtattctaatttctggtgcggaatcacccctaagggcttctataagaggaccccagactacgttcagattcgagaatggaagaggacaggctgcttccccgtccccatggtccactccaccttcctaattgacctcaggaaggaggcctcggacaagctgactttctaccccccacaccaggactacacctggacctttgatgacatcattgtctttgccttctccagcaggcaagcaggcatccagatgtacctctgcaacagagagcactatggctacctgcccatccccctgaagccccatcagacactgcaggaagacatcgagaacctcatccatgtgcagattgaagcaatgattgaccgtcctccaatggaaccctcccagtatgtctcagttgtccctaaatatccagacaagatgggatttgatgagattttcatgataaacctcaaacgcagaaaggacaggcgggaccggatgctgcgcacactgtatgaacaggagattgaggtcaagattgtcgaggctgtggatggaaaggcactcaacacaagccagctgaaggcactgaatattgaaatgctgcctggctatcgagatccctattcctccaggcctctaacaaggggtgaaatcggctgctttctcagccactactcagtctggaaagaggtaattgatcgagagctagagaagactcttgtaattgaagacgatgtgcgttttgagcatcagtttaagaagaagctgatgaagctgatggataacattgaccaggctcagctggactgggaactgatttatattggtaggaagaggatgcaagtaaaggagccagagaaagcagtgcccaatgtggcaaacctggtcgaagccgactattcctactggaccctgggctacgtcatctctctggaaggagcacagaagctggttggagccaatccttttgggaagatgctgccagtggatgagtttctgccagtcatgtacaacaagcatcccgtagccgagtacaaggagtattatgaatccagggacctgaaagccttctctgcagaacccttgctcatctaccctacgcactacacaggccagccggggtacctgagtgacacggagacctccaccatctgggacaatgagacagtggccaccgactgggataggacacatgcctggaagtcccggaagcaaagccgcatctacagcaatgccaagaacacagaggccctgccaccgccaacctccctggacactgtgccttcaagggatgagcta

SEQ ID NO: 5732 - DNA, 1647 bp, Homo Sapiens
cggcgggcggcgggcggcctgcacctgctgccctggtcccgcggtgagccgggcgccgccgagccgtctgcctgcctggaggcggccacccgcgcctggcgcggcctgcgggagcgcggtgaggtggtaccgctgggtcctggagtgccggccctggtggccaacggcttcctggcactggacgtggctgccaatcggctgtgggtgactcccggggagcgggagcccgccgtggcgccggactttgtgcccttcgtgcagctgcgcccgctgagcgcgctggctgaagctggagaggcggtgctgctgctgcgggaggggcttctgcgccgcgtgcgttgcctgcagctggggtccccaggtcctggccccgtggccgccggccccgggcccgcctccgtctctggccttgccgcggggtccggccgcgactgcgtgctgctgcaagaggactttctggcgcacaggggccgaccccacgtctacctgcagcgcatccagctcaacaaccccacggagcgcgtggccgcgctgcagactgtggggcccactgccggcccagcccccaaggccttcaccagtaccctggagaaggtcggagaccatcagttcctcctctactcaggccggtccccgcctacgcccactgggttggtgcacctggtggtggtggccgccaagaagctggtgaaccgcctccaagtggctcccaagacgcagctggatgagacggtgctgtgggtggtgcacgtctctggccccattaacccccaggtgctcaaaagcaaagcagccaaggagctcaaggcgctgcaggacttggcacggaaggaaatgctggagctcttggacatgccagcggcggagctgcttcaagaccaccagctcctctgggctcagctcttcagcccaggagtggaaatgaagaagatcactgacacccacacgccgtctggcctcaccgtgaacctgacgctctattacatgctctcctgctcgccagccccactgctcagcccctccctgagccacagggagcgagaccagatggagtcgacgctcaactatgaagatcactgcttcagcgggcacgccaccatgcacgccgagaacctgtggccggggcggctgtcctccgtccagcagatcctgcagctctctgacctgtggaggctgaccctccagaagcgtggctgcaaggggctggtgaaggtgggtgccccaggcatcctgcaggggatggtgctcagctttggggggctgcagttcacagagaaccacctccagttccaggccgaccccgacgtgctgcacaacagctatgcattgcatggcatccgctacaagaacgaccatatcaacctggccgtgctggcggatgccgagggcaagccctacctacacgtgtccgtggagtcccgtggccagcctgtcaagatctatgcctgcaaggcaggctgcctggacgagccagtggagctgacctcggcgcccacgggccacaccttctcggtcatggtgacacagcccatcacgccactgctctacatctccaccgacctcacacacctgcaggacctgcggcacacgctgcacctcaaggccatcctggcccatgatgagcacatggcccagcaggaccccggg

SEQ ID NO: 5733 - DNA, 3120 bp, Homo Sapiens
gacgtggtgcgctcggagcagcagataccgctctccgtggtgaagctctgggcctcggcttttggtggggagataaaatccattgctgctaagtactccggttcccagcttctgcaaaagaaatacaaagagtatgagaaagacgttgccatagaagaaattgatggcctccaactggtaaagaagctggcaaagaacatggaagagatgtttcacaagaagtctgaggccgtcaggcgtctggtggaggctgcagaagaagcacacctgaaacatgaatttgatgcagacttacagtatgaatacttcaatgctgtgctgataaatgaaagggacaaagacgggaattttttggagctgggaaaggaattcatcttagccccaaatgaccattttaataatttgcctgtgaacatcagtctaagtgacgtccaagtaccaacgaacatgtacaacaaagaccctgcaattgtcaatggggtttattggtctgaatctctaaacaaagtttttgtagataactttgaccgtgacccatctctcatatggcagtactttggaagtgcaaagggcttttttaggcagtatccggggattaaatgggaaccagatgagaatggagtcattgccttcgactgcaggaaccgaaaatggtacatccaggcagcaacttctccgaaagacgtggtcattttagttgacgtcagtggcagcatgaaaggactccgtctgactatcgcgaagcaaacagtctcatccattttggatacacttggggatgatgacttcttcaacataattgcttataatgaggagcttcactatgtggaaccttgcctgaatggaactttggtgcaagccgacaggacaaacaaagagcacttcagggagcatctggacaaacttttcgccaaaggaattggaatgttggatatagctctgaatgaggccttcaacattctgagtgatttcaaccacacgggacaaggaagtatctgcagtcaggccatcatgctcataactgatggggcggtggacacctatgatacaatctttgcaaaatacaattggccagatcgaaaggttcgcatcttcacatacctcattggacgagaggctgcgtttgcagacaatctaaagtggatggcctgtgccaacaaaggattttttacccagatctccaccttggctgatgtgcaggagaatgtcatggaataccttcacgtgcttagccggcccaaagtcatcgaccaggagcatgatgtggtgtggaccgaagcttacattgacagcactctccctcaggcacaaaagctgactgatgatcagggccccgtcctgatgaccactgtagccatgcctgtgtttagtaagcagaacgaaaccagatcgaagggcattcttctgggagtggttggcacagatgtcccagtgaaagaacttctgaagaccatccccaaatacaagttagggattcacggttatgcctttgcaatcacaaataatggatatatcctgacgcatccggaactcaggctgctgtacgaagaaggaaaaaagcgaaggaaacctaactatagtagcgttgacctctctgaggtggagtgggaagaccgagatgacgtgttgagaaatgctatggtgaatcgaaagacggggaagttttccatggaggtgaagaagacagtggacaaagggaaacgggttttggtgatgacaaatgactactattatacagacatcaagggtactcctttcagtttaggtgtggcgctttccagaggtcatgggaaatatttcttccgagggaatgtaaccatcgaagaaggcctgcatgacttagaacatcccgatgtgtccttggcagatgaatggtcctactgcaacactgacctacaccctgagcaccgccatctgtctcagttagaagcgattaagctctacctaaaaggcaaagaacctctgctccagtgtgataaagaattgatccaagaagtcctttttgacgcggtggtgagtgcccccattgaagcgtattggaccagcctggccctcaacaaatctgaaaattctgacaagggcgtggaggttgccttcctcggcactcgcacgggcctctccagaatcaacctgtttgtcggggctgagcagctcaccaatcaggacttcctgaaagctggtgacaaggagaacatttttaacgcagaccatttccctctctggtaccgaagagccgctgagcagattccagggagcttcgtctactcgatcccattcagcactggaccagtcaataaaagcaatgtggtgacagcaagtacatccatccagctcctggatgaacggaaatctcctgtggtggcagctgtaggcattcagatgaaacttgaatttttccaaaggaagttctggactgccagcagacagtgtgcttccctggatggcaaatgctccatcagctgtgatgatgagactgtgaattgttacctcatagacaataatggatttattttggtgtctgaagactacacacagactggagacttttttggtgagatcgagggagctgtgatgaacaaattgctaacaatgggctcctttaaaagaattaccctttatgactaccaagccatgtgtagagccaacaaggaaagcagcgatggcgcccatggcctcctggatccttataatgccttcctctctgcagtaaaatggatcatgacagaacttgtcttgttcctggtggaatttaacctctgcagttggtggcactccgatatgacagctaaagcccagaaattgaaacagaccctggagccttgtgatactgaatatccagcattcgtctctgagcgcaccatcaaggagactacagggaatattgcttgtgaagactgctccaagtcctttgtcatccagcaaatcccaagcagcaacctgttcatggtggtggtggacagcagctgcctctgtgaatctgtggcccccatcaccatggcacccattgaaatcaggtataatgaatcccttaagtgtgaacgtctaaaggcccagaagatcagaaggcgcccagaatcttgtcatggcttccatcctgaggagaatgcaagggagtgtggg

SEQ ID NO: 5734 - DNA, 1398 bp, Homo Sapiens
ctccttcatccagacagcaggtctcatcctaggtccttagagaaaagtgcctggagggcttttaaggagtcacagtgccatcacatgctcaaacatctccacaatggtgcaaggatcacagtgcagatgccacctacaatcgagggccactgggtctccacaggctgtgaagtaaggtcaggcccagagttcatcacaaggtcctacagattctaccacaataacaccttcaaggcctaccaattttattatggcagcaaccggtgcacaaatcccacttatactctcatcatccggggcaagatccgcctccgccaggcctcctggatcatccgagggggcacggaagccgactaccagctgcacaacgtccaggtgatctgccacacagaggcggtggccgagaagctcggccagcaggtgaaccgcacatgcccgggcttcctcgcagacgggggtccctgggtgcaggacgtggcctatgacctctggcgagaggagaacggctgtgagtgcaccaaggccgtgaactttgccatgcatgaacttcagctcatccgggtggagaagcagtaccttcaccacaacctcgaccacctggtcgaggagctcttccttggtgacattcacactgatgccacccagaggatgttctaccggccctccagttaccagccccctctgcagaatgccaagaaccacgaccatgcctgcatcgcctgtcggatcatctatcggtcagacgagcaccaccctcccatcctgcccccaaaggcagacctgaccatcggcctgcacggggagtgggtgagccagcgctgtgaggtgcgccccgaagtcctcttcctcacccgccacttcatcttccatgacaacaacaacacctgggagggccactactaccactactcagacccggtgtgcaagcaccccaccttctccatctacgcccggggccgctacagccgcggcgtcctctcgtccagggtcatgggaggcaccgagttcgtgttcaaagtgaatcacatgaaggtcacccccatggatgcggccacagcctcactgctcaacgtcttcaacgggaatgagtgcggggccgagggctcctggcaggtgggcatccagcaggatgtgacccacaccaatggctgcgtggccctgggcatcaaactacctcacacggagtacgagatcttcaaaatggaacaggatgcccgggggcgctatctgctgttcaacggtcagaggcccagcgacgggtccagcccagacaggccagagaagagagccacgtcctaccagatgcccttggtccagtgtgcctcctcttcgccgagggcagaggacctcgcagaagacagtggaagcagcctgtatggccgggcccctgggaggcac

SEQ ID NO: 5735 - DNA, 1905 bp, Homo Sapiens
caagcacagtatccagttgtcaacacaaattatggcaaaatccggggcctaagaacaccgttacccaatgagatcttgggtccagtggagcagtacttaggggtcccctatgcctcaccccccactggagagaggcggtttcagcccccagaacccccgtcctcctggactggcatccgaaatactactcagtttgctgctgtgtgcccccagcacctggatgagagatccttactgcatgacatgctgcccatctggtttaccgccaatttggatactttgatgacctatgttcaagatcaaaatgaagactgcctttacttaaacatctacgtgcccacggaagatgatattcatgatcagaacagtaagaagcccgtcatggtctatatccatgggggatcttacatggagggcaccggcaacatgattgacggcagcattttggcaagctacggaaacgtcattgtgatcaccattaactaccgtctgggaatactagggtttttaagtaccggtgaccaggcagcaaaaggcaactatgggctcctggatcagattcaagcactgcggtggattgaggagaatgtgggagcctttggcggggaccccaagagagtgaccatctttggctcgggggctggggcctcctgtgtcagcctgttgaccctgtcccactactcagaaggtctcttccagaaggccatcattcagagcggcaccgccctgtccagctgggcagtgaactaccagccggccaagtacactcggatattggcagacaaggtcggctgcaacatgctggacaccacggacatggtagaatgcctgcggaacaagaactacaaggagctcatccagcagaccatcaccccggccacctaccacatagccttcgggccggtgatcgacggcgacgtcatcccagacgacccccagatcctgatggagcaaggcgagttcctcaactacgacatcatgctgggcgtcaaccaaggggaaggcctgaagttcgtggacggcatcgtggataacgaggacggtgtgacgcccaacgactttgacttctccgtgtccaacttcgtggacaacctttacggctaccctgaagggaaagacactttgcgggagactatcaagttcatgtacacagactgggccgataaggaaaacccggagacgcggcggaaaaccctggtggctctctttactgaccaccagtgggtggcccccgccgtggccaccgccgacctgcacgcgcagtacggctcccccacctacttctatgccttctatcatcactgccaaagcgaaatgaagcccagctgggcagattcggcccatggtgatgaggtcccctatgtcttcggcatccccatgatcggtcccaccgagctcttcagttgtaacttttccaagaacgacgtcatgctcagcgccgtggtcatgacctactggacgaacttcgccaaaactggtgatccaaatcaaccagttcctcaggataccaagttcattcacacaaaacccaaccgctttgaagaagtggcctggtccaagtataatcccaaagaccagctctatctgcatattggcttgaaacccagagtgagagatcactaccgggcaacgaaagtggctttctggttggaactcgttcctcatttgcacaacttgaacgagatattccagtatgtttcaacaaccacaaaggttcctccaccagacatgacatcatttccctatggcacccggcgatctcccgccaagatatggccaaccaccaaacgcccagcaatcactcctgccaacaatcccaaacactctaaggaccctcacaaaacagggcctgaggacacaactgtcctcattgaaaccaaacgagattattccaccgaattaagt

SEQ ID NO: 5736 - DNA, 282 bp, Homo Sapiens
ctgtgctccgggtcctcatattttgtgcttgcaaatggacatatcctgcccaacagtgaaaatgctcatggccaatctctggaagaagattccgcattggaagctttgctgaattttttctttccaacaacttgcaatctgagggaaaatcaggtggcaaagccttgtaatgagctgcaagatcttagtgagagtgaatgtttgagacacaaatgctgtttttcatcatcggggaccacgagcttcaaatgttttgctccatttagagatgtgcctaaacag

SEQ ID NO: 5737 - DNA, 681 bp, Homo Sapiens
gggatgttgaaggaggaggacgatgacacagaacgcttgcccagcaaatgcgaagtgtgtaagctgctgagcacagagctacaggcggaactgagtcgcaccggtcgatctcgagaggtgctggagctggggcaggtgctggatacaggcaagaggaagagacacgtgccttacagcgtttcagagacaaggctggaagaggccttagagaatttatgtgagcggatcctggactatagtgttcacgctgagcgcaagggctcactgagatatgccaagggtcagagtcagaccatggcaacactgaaaggcctagtgcagaagggggtgaaggtggatctggggatccctctggagctttgggatgagcccagcgtggaggtcacatacctcaagaagcagtgtgagaccatgttggaggagtttgaagacattgtgggagactggtacttccaccatcaggagcagcccctacaaaattttctctgtgaaggtcatgtgctcccagctgctgaaactgcatgtctacaggaaacttggactggaaaggagatcacagatggggaagagaaaacagaaggggaggaagagcaggaggaggaggaggaagaggaggaagaggaagggggagacaagatgaccaagacaggaagccaccccaaacttgaccgagaagatctt

SEQ ID NO: 5738 - DNA, 420 bp, Homo Sapiens
catgaaagcgcagccatggcggcatctgcaaacatagagaattctgggcttccacacaactccagtgctaactcaacagagactctccaacatgtgccttctgaccatacaaatgaaacttccaacagtactgtgaaaccaccaacttcagttgcctcagactccagtaatacaacggtcaccaccatgaaacctacagcggcatctaatacaacaacaccagggatggtctcaacaaatatgacttctaccaccttaaagtctacacccaaaacaacaagtgtttcacagaacacatctcagatatcaacatccacaatgaccgtaacccacaatagttcagtgacatctgctgcttcatcagtaacaatcacaacaactatgcattctgaagcaaagaaaggatcaaaatttgatact

SEQ ID NO: 5739 - DNA, 1593 bp, Homo Sapiens
agcgaggcaaaggtcacccggagttgtgcagagacccggcaggtgctgggggcccggggatatagcttaaacctaatccctcccgccctgatctcaggtgagcacctccgggtctgtccccaggagtacacctgctgttccagtgagacagagcagaggctgatcagggagactgaggccaccttccgaggcctggtggaggacagcggctcctttctggttcacacactggctgccaggcacagaaaatttgatgagttttttctggagatgctctcagtagcccagcactctctgacccagctcttctcccactcctacggccgcctgtatgcccagcacgccctcatattcaatggcctgttctctcggctgcgagacttctatggggaatctggtgaggggttggatgacaccctggcggatttctgggcacagctcctggagagagtgttcccgctgctgcacccacagtacagcttcccccctgactacctgctctgcctctcacgcttggcctcatctaccgatggctctctgcagccctttggggactcaccccgccgcctccgcctgcagataacccggaccctggtggctgcccgagcctttgtgcagggcctggagactggaagaaatgtggtcagcgaagcgcttaaggtgccggtgtctgaaggctgcagccaggctctgatgcgtctcatcggctgtcccctgtgccggggggtcccctcacttatgccctgccagggcttctgcctcaacgtggttcgtggctgtctcagcagcaggggactggagcctgactggggcaactatctggatggtctcctgatcctggctgataagctccagggccccttttcctttgagctgacggccgagtccattggggtgaagatctcggagggtttgatgtacctgcaggaaaacagtgcgaaggtgtccgcccaggtgtttcaggagtgcggcccccccgacccggtgcctgcccgcaaccgtcgagccccgccgccccgggaagaggcgggccggctgtggtcgatggtgaccgaggaggagcggcccacgacggccgcaggcaccaacctgcaccggctggtgtgggagctccgcgagcgtctggcccggatgcggggcttctgggcccggctgtccctgacggtgtgcggagactctcgcatggcagcggacgcctcgctggaggcggcgccctgctggaccggagccgggcggggccggtacttgccgccagtggtcgggggctccccggccgagcaggtcaacaaccccgagctcaaggtggacgcctcgggccccgatgtcccgacacggcggcgtcggctacagctccgggcggccacggccagaatgaaaacggccgcactgggacacgacctggacgggcaggacgcggatgaggatgccagcggctctggagggggacagcagtatgcagatgactggatggctggggctgtggctcccccagcccggcctcctcggcctccataccctcctagaagggatggttctgggggcaaaggaggaggtggcagtgcccgctacaaccagggccggagcaggagtggg

SEQ ID NO: 5740 - DNA, 711 bp, Homo Sapiens
gttgataaggcagatgatgaagatgatgaggatttaacggtgaacaaaacctgggtcttggccccaaaaattcatgaaggagatatcacacaaattctgaattcattgcttcaaggctatgacaataaacttcgtccagatataggagtgaggcccacagtaattgaaactgatgtttatgtaaacagcattggaccagttgatccaattaatatggaatatacaatagatataatttttgcccaaacctggtttgacagtcgtttaaaattcaatagtaccatgaaagtgcttatgcttaacagtaatatggttggaaaaatttggattcctgacactttcttcagaaactcaagaaaatctgatgctcactggataacaactcctaatcgtctgcttcgaatttggaatgatggacgagttctgtatactctaagattgacaattaatgcagaatgttatcttcagcttcataactttcccatggatgaacattcctgtccactggaattttcaagctatggataccctaaaaatgaaattgagtataagtggaaaaagccctccgtagaagtggctgatcctaaatactggagattatatcagtttgcatttgtagggttacggaactcaactgaaatcactcacacgatctctggggattatgttatcatgacaattttttttgacctgagcagaagaatgggatat

SEQ ID NO: 5741 - DNA, 525 bp, Homo Sapiens
agcaactggggatgctatggaaacatccaaagcctggacacccctggagcatcttgtgggattggaagacgtcacggcctgaactactgtggagttcgtgcttctgaaaggctggctgaaatagacatgccatacctcctgaaatatcaacccatgatgcaaaccattggccaaaagtactgcatggatcctgccgtgatcgctggtgtcttgtccaggaagtctcccggtgacaaaattctggtcaacatgggcgataggactagcatggtgcaggaccctggctctcaagctcccacatcctggattagtgagtctcaggtttcccagacaactgaagttctgactactagaatcaaagaaatccagaggaggtttccaacctggacccctgaccagtacctgagaggtggactctgtgcctacagtgggggtgctggctatgtccgaagcagccaggacctgagctgtgacttctgcaatgatgtccttgcacgagccaagtacctcaagagacatggcttc

SEQ ID NO: 5742 - DNA, 927 bp, Homo Sapiens
atacaggccaaactgattttcttgaatttcgtaagagttccctatttcattgatttgaaaaaaccacaggatcaaggtttgaatcacacgtgtaactactacctgcagccagaggaagacgtgaccattggagtctggcacaccgtccctgcagtctggtggaagaacgcccaaggcaaagaccagatgtggtatgaggatgccttggcttccagccaccctatcattctgtacctgcatgggaacgcaggtaccagaggaggcgaccaccgcgtggagctttacaaggtgctgagttcccttggttaccatgtggtcacctttgactacagaggttggggtgactcagtgggaacgccatctgagcggggcatgacctatgacgcactccacgtttttgactggatcaaagcaagaagtggtgacaaccccgtgtacatctggggccactctctgggcactggcgtggcgacaaatctggtgcggcgcctctgtgagcgagagacgcctccagatgcccttatattggaatctccattcactaatatccgtgaagaagctaagagccatccattttcagtgatatatcgatacttccctgggtttgactggttcttccttgatcctattacaagtagtggaattaaatttgcaaatgatgaaaacgtgaagcacatctcctgtcccctgctcatcctgcacgctgaggacgacccggtggtgcccttccagcttggcagaaagctctatagcatcgccgcaccagctcgaagcttccgagatttcaaagttcagtttgtgccctttcattcagaccttggctacaggcacaaatacatttacaagagccctgagctgccacggatactgagacctcagcagggcccaggttccagcccagatcccagcatgtggtcagagctggtg

SEQ ID NO: 5743 - DNA, 1896 bp, Homo Sapiens
caaaaattggatgatgtggacccactggtggctaccaactttggaaagataagagggattaagaaggaactcaataatgaaattttggggcctgttattcaatttcttggggttccatatgcagccccaccaacaggggaacgtcgttttcagcctccagaaccaccatctccctggtcagatatcagaaatgccactcaatttgctcctgtgtgtccccagaatatcattgatggcagattgccagaagtcatgcttcctgtgtggtttactaataacttggatgtggtttcatcatatgtgcaagaccagagcgaagactgcctatatttaaatatatatgtcccgactgaggatgatattcgggacagtgggggtcccaaaccagtgatggtgtatatccatggtggctcatatatggaaggtactggaaatttatatgatggaagtgtcttggcaagttatggcaatgtgatcgtcatcacagtcaactatcgacttggagtactcggtttcttgagtacaggcgatcaggctgcaaaggggaactatggactccttgatctcatacaagctttaagatggactagtgaaaacattggattctttggtggtgaccccttaagaatcactgtttttggatctggtgctgggggttcatgtgtcaacctgctgactttatcccattattctgaaggtaaccgttggagcaattcaaccaaaggactttttcaacgagcaatagctcaaagtggaacagccctttccagctgggctgttagttttcaacctgcaaaatatgctagaatgttggccacaaaagttggttgcaatgtttcagatacagtagagttagtggaatgcctacagaagaagccttacaaagaacttgttgaccaagatattcaaccagctcgataccacatagcctttggacctgtgattgatggtgatgtaataccagacgacccccagatattgatggagcaaggagagtttctcaactatgatataatgttaggagtgaaccaaggggaagggttaaaatttgttgaaaatatagtagatagcgatgatggtatatcagctagtgattttgactttgctgtttcaaattttgttgataatttatatggatatcctgaaggcaaagatgttttgagagaaaccattaagttcatgtatactgactgggctgaccgtcataaccctgaaaccagaagaaagacattactggctttgtttacggaccatcagtgggtggcaccagctgtagccacagcggatcttcactcaaactttggttcacctacgtacttctatgccttttaccatcattgccaaacagatcaggttccagcttgggctgatgcagcccacggagacgaggttccctatgtactgggaatccccatgattggccctacagagttatttccttgcaatttctccaaaaatgatgtgatgctgagtgcagttgtaatgacatactggacaaattttgctaaaactggtgacccaaatcaaccagtccctcaagacacgaaattcattcataccaaacccaaccgttttgaagaagtagcatggaccagatattcccagaaagaccaactttatctccatattggattaaaaccaagagttaaagaacattacagagccaataaggtgaacctctggttggagttggtacctcatctgcataatctcaatgacatttctcagtatacctctacaacaactaaagtgccatcaactgacatcactttcagacctacgagaaaaaattctgtacctgtcacgtcagcctttcccactgccaagcaggatgatcccaaacaacaaccaagtccattttcagtggatcaaagggactactcaacagagctgagt

SEQ ID NO: 5744 - DNA, 2139 bp, Homo Sapiens
gcctcggaggcgccgtccccgccgcggtcgccgccgccgcccacctcccccgagcctgagctggcccagctaaggcggaaggtggagaagttggaacgtgaactgcggagctgcaagcggcaggtgcgggagatcgagaagctgctgcatcacacagaacggctgtaccagaacgcagaaagcaacaaccaggagctccgcacgcaggtggaagaactcagtaaaatactccaacgtgggagaaatgaagataataaaaagtctgatgtagaagtacaaacagagaaccatgctccttggtcaatctcagattatttttatcagacgtactacaatgacgttagtcttccaaataaagtgactgaactgtcagatcaacaagatcaagctatcgaaacttctattttgaattctaaagaccatttacaagtagaaaatgatgcttaccctggtaccgatagaacagaaaatgttaaatatagacaagtggaccattttgcctcaaattcacaggagccagcatctgcattagcaacagaagatacctccttagaaggctcatcattagctgaaagtttgagagctgcagcagaagcggctgtatcacagactggatttagttatgatgaaaatactggactgtattttgaccacagcactggtttctattatgattctgaaaatcaactctattatgatccttccactggaatttattactattgtgatgtggaaagtggtcgttatcagtttcattctcgagtagatttgcaaccttatccgacttctagcacaaaacaaagtaaagataaaaaattgaagaagaaaagaaaagatccagattcttctgcaacaaatgaggaaaaggatttgaactcagaggatcaaaaagccttcagtgttgaacatacaagctgcaatgaggaagaaaatttcgcaaatatgaaaaagaaggccaaaataggcattcatcacaaaaatagtccccccaaagtcactgttccaactagtggaaatactatagagtctcctcttcatgaaaacatctctaattcaacatcatttaaagatgagaaaatcatggagactgatagtgaaccagaggaaggtgaaattacagactctcagactgaggatagttatgacgaagccattaccagtgaaggcaatgtaactgcagaagatagtgaggatgaagatgaagacaaaatttggcccccatgtattagagtaattgtcattagatcacctgtgttgcagataggatcactctttatcattactgctgtaaaccctgctacaattggaagagaaaaggatatggaacatactctccgaatccctgaagttggtgtcagtaagtttcatgcagaaatttattttgaccatgacttacaaagttatgtccttgtggatcaaggcagtcaaaatggcacaattgttaatggaaaacagattcttcagccgaaaactaaatgtgacccttacgtacttgagcatggagatgaagtcaaaattggagaaactgtcttatcctttcacattcatcctggcagtgatacctgtgatggctgtgaacgagggcaggttagagcccaccttcgccttgataagaaagatgaatcttttgttggtccaacactaagtaaggaggaaaaagagttggaaggaagaaaagaattaaagaaaatacgagtaaaatatggtttacagaatacagaatacgaagatgaaaagacattgaagaatccaaaatataaagatagagctggaaaacgtagggagcaggttggaagtgaaggaactttccaaagagatgatgctcctgcatctgttcattctgaaattactgatagcaacaaaggtcggaagttgttggagaagatgggttggaagaaaggagagggcctggggaaggatggtggaggaatgaaaacgccgatccagcttcagcttcggcgaacacatgcaggcttggggacaggcaaaccatcctcatttgaagatgttcaccttctccaaaacaagaacaaaaaaaactgggacaaagcacgagagcggtttactgaaaacttcccagaaactaagcctcaaaaagatgacccagggaccatgccttgggtaaaagggactttagag

SEQ ID NO: 5745 - DNA, 639 bp, Homo Sapiens
aaagaaaatcaagacataaacacaacacagaacattgcagaagtttttaaaacaatggaaaataaacctatttctttggaaagtgaagcaaacttaaactcagataaagaaaatataaccacctcaaatctcaaggcgagtcattcccctcctttgaatctacccaacaacagccacggaataacagatttctccagtaactcgtcagcagagcattctttgggcagtctaaaacccacatctaccatttccacaagccctcccttgatccatagctttgtttctaaagtgccttggaatgcacctatagcagatgaagatcttttgcccatctcagcacatcccaatgctacacctgctctgtcttcagaaaacttcacttggtctttggtcaatgacaccgtgaaaactcctgataacagttccattacagttagcatcctctcttcagaaccaacttctccatctgtgacccccttgatagtggaaccaagtggatggcttaccacaaacagtgatagcttcactgggtttatcccttatcaagaaaaaacaactctacagcctaccttaaaattcaccaataattcaaaactctttccaaatacgtcagatccccaaaaagaaaatagaaataca

SEQ ID NO: 5746 - DNA, 303 bp, Homo Sapiens
gcaaaccatcataaagctcaccatgttaaaacgggaacttgtgaggtggtggcactccacagatactgtaataagaacaagatagaagaacggtcacaaacagtcaagtactcctgcttccctgggcaggtggcaggcaccacgcgagctgctccatcatgtgtggatgcttcaatagtggaacagaaatggtggtgccatatgcagccatgtctagagggagaagaatgtaaagttcttccggatcggaaaggatggagctgttcctctgggaataaagtcaaaacaactagggtaacccat

SEQ ID NO: 5747 - DNA, 1191 bp, Homo Sapiens
ctcattgatggatctgaaatggaatgggattttatgtggcacttgagaaaggtaccccggattgtcagtgaaaggactttccatctcaccagccccgcatttgaggcagatgctaagatgatggtaaatacagtgtgtggcatcgaatgccagaaagaactcccaactcccagcctttctgaattggaggattatctttcctatgagactgtctttgagaatggcacccgaaccttaaccagggtgaaagttcaagatttggttcttgagccgactcaaaatatcaccacaaagggagtatctgttaggagaaagagacaggtgtatggcaccgacagcaggttcagcatcttggacaaaaggttcttaaccaatttccctttcagcacagctgtgaagctttccacgggctgtagtggcattctcatttcccctcagcatgttctaactgctgcccactgtgttcatgatggaaaggactatgtcaaagggagtaaaaagctaagggtagggttgttgaagatgaggaataaaagtggaggcaagaaacgtcgaggttctaagaggagcaggagagaagctagtggtggtgaccaaagagagggtaccagagagcatctgcaggagagagcgaagggtgggagaagaagaaaaaaatctggccggggtcagaggattgccgaagggaggccttcctttcagtggacccgggtcaagaatacccacattccgaagggctgggcacgaggaggcatgggggacgctaccttggactatgactatgctcttctggagctgaagcgtgctcacaaaaagaaatacatggaacttggaatcagcccaacgatcaagaaaatgcctggtggaatgatccacttctcaggatttgataacgatagggctgatcagttggtctatcggttttgcagtgtgtccgacgaatccaatgatctcctttaccaatactgcgatgctgagtcgggctccaccggttcgggggtctatctgcgtctgaaagatccagacaaaaagaattggaagcgcaaaatcattgcggtctactcagggcaccagtgggtggatgtccacggggttcagaaggactacaacgttgctgttcgcatcactcccctaaaatacgcccagatttgcctctggattcacgggaacgatgccaattgtgcttacggc

SEQ ID NO: 5748 - DNA, 2193 bp, Homo Sapiens
cagggcgcagccctcgaggaccctgattattacgggcaggagatctggagccgggagccctactacgcgcgcccggagcccgagctcgagaccttctctccgccgctgcctgcggggcccggggaggagtgggagcggcgcccgcaggagcccaggccgcccaagagggccaccaagcccaagaaagctcccaagagggagaagtcggctccggagccgcctccaccaggtaaacacagcaacaaaaaagttatgagaaccaagagctctgagaaggctgccaacgatgatcacagtgtccgtgtggcccgtgaagatgtcagagagagttgcccacctcttggtctggaaaccttaaaaatcacagacttccagctccatgcctccacggtgaagcgctatggcctgggggcacatcgagggagactcaacatccaggcgggcattaatgaaaatgatttttatgacggagcgtggtgcgcgggaagaaatgacctccagcagtggattgaagtggatgctcggcgcctgaccagattcactggtgtcatcactcaagggaggaactccctctggctgagtgactgggtgacatcctataaggtcatggtgagcaatgacagccacacgtgggtcactgttaagaatggatctggagacatgatatttgagggaaacagtgagaaggagatccctgttctcaatgagctacccgtccccatggtggcccgctacatccgcataaaccctcagtcctggtttgataatgggagcatctgcatgagaatggagatcctgggctgcccactgccagatcctaataattattatcaccgccggaacgagatgaccaccactgatgacctggattttaagcaccacaattataaggaaatgcgccagttgatgaaagttgtgaatgaaatgtgtcccaatatcaccagaatttacaacattggaaaaagccaccagggcctgaagctgtatgctgtggagatctcagatcaccctggggagcatgaagtcggtgagcccgagttccactacatcgcgggggcccacggcaatgaggtgctgggccgggagctgctgctgctgctggtgcagttcgtgtgtcaggagtacttggcccggaatgcgcgcatcgtccacctggtggaggagacgcggattcacgtcctcccctccctcaaccccgatggctacgagaaggcctacgaagggggctcggagctgggaggctggtccctgggacgctggacccacgatggaattgacatcaacaacaactttcctgatttaaacacgctgctctgggaggcagaggatcgacagaatgtccccaggaaagttcccaatcactatattgcaatccctgagtggtttctgtcggaaaatgccacggtggctgccgagaccagagcagtcatagcctggatggaaaaaatcccttttgtgctgggcggcaacctgcagggcggcgagctggtggtggcgtatccctacgacctggtgcggtccccctggaagacgcaggaacacacccccacccccgatgaccacgtgttccgctggctggcctactcctatgcctccacacaccgcctcatgacagacgcccggaggagggtgtgccacacggaggacttccagaaggaggagggcactgtcaatggggcctcctggcacaccgtcgctggaagtctgaacgatttcagctaccttcatacaaactgcttcgaactgtccatctacgtgggctgtgataaatacccacatgagagccagctgcccgaggagtgggagaataaccgggaatctctgatcgtgttcatggagcaggttcatcgtggcattaaaggcttggtgagagattcacatggaaaaggaatcccaaacgccattatctccgtagaaggcattaaccatgacatccgaacagccaacgatggggattactggcgcctcctgaaccctggagagtatgtggtcacagcaaaggccgaaggtttcactgcatccaccaagaactgtatggttggctatgacatgggggccacaaggtgtgacttcacacttagcaaaaccaacatggccaggatccgagagatcatggagaagtttgggaagcagcccgtcagcctgccagccaggcggctgaagctgcgggggcggaagagacgacagcgtggg

SEQ ID NO: 5749 - DNA, 849 bp, Homo Sapiens
agcgagtacgactacgtgagcttccagtcggacatcggcccgtaccagagcgggcgcttctacaccaagccacctcagtgcgtggacatccccgcggacctgcggctgtgccacaacgtgggctacaagaagatggtgctgcccaacctgctggagcacgagaccatggcggaggtgaagcagcaggccagcagctgggtgcccctgctcaacaagaactgccacgccggcacccaggtcttcctctgctcgctcttcgcgcccgtctgcctggaccggcccatctacccgtgtcgctggctctgcgaggccgtgcgcgactcgtgcgagccggtcatgcagttcttcggcttctactggcccgagatgcttaagtgtgacaagttccccgagggggacgtctgcatcgccatgacgccgcccaatgccaccgaagcctccaagccccaaggcacaacggtgtgtcctccctgtgacaacgagttgaaatctgaggccatcattgaacatctctgtgccagcgagtttgcactgaggatgaaaataaaagaagtgaaaaaagaaaatggcgacaagaagattgtccccaagaagaagaagcccctgaagttggggcccatcaagaagaaggacctgaagaagcttgtgctgtacctgaagaatggggctgactgtccctgccaccagctggacaacctcagccaccacttcctcatcatgggccgcaaggtgaagagccagtacttgctgacggccatccacaagtgggacaagaaaaacaaggagttcaaaaacttcatgaagaaaatgaaaaaccatgagtgccccacctttcagtccgtgtttaag

SEQ ID NO: 5750 - DNA, 1314 bp, Homo Sapiens
tccacgccaggcaccgtggtccgactcaacaaggcagcattgagctacgtgtctgaaattgggaaagcccctctccagcgggccctgcaggtcactgtccctcatttcctggactggagtggagaggcgcttcagcccaccaggatccggattctgaatgtccatgtgccccgcctccacctgaaattcattgctggtttcggagtgcgcctgctggcagcagctaattttactttcaaggtctttcgcgccccagagcccctggagctgacgctgcctgtggaactgctggctgacacccgcgtgacccagagctccatcaggacccctgtggtcagcatctctgcctgctctttattctcgggccacgccaacgagtttgatggcagtaacagcacctcccacgcgctgctggtcctggtgcagaagcacattaaagctgtcttgagtaacaagctgtgcctgagcatctccaacctggtgcagggtgtcaatgtccacctgggcaccttaattggcctcaaccccgtgggtcctgagtcccagatccgctattccatggtcagtgtgcccactgtcaccagtgactacatttccctggaagtcaatgctgttctcttcctgctgggcaagcccatcatcctgcccacggatgccaccccttttgtgttgccaaggcatgtgggtaccgagggctccatggccaccgggggcctctcccagcagctgtttgactctgcgctcctgctgctgcagaaggccggtgccctcaacctggacatcacagggcagctgaggtcggatgacaacctgctgaacacctctgctctgggccggctcatcccggaggtggcccgccagtttcccgagcccatgcctgtggtgctcaaggtgcggctgggtgccacacctgtggccatgctccacacaaacaacgccaccctgcggctgcagcccttcgtggaggtcctggccacagcctccaactcggctttccagtccctcttctccctggatgtggtagtgaacttgagactccagctctctgtgtccaaggtgaagcttcaggggaccacgtctgtgctgggggatgtccagctcacggtggcctcctccaacgtgggcttcattgatacagatcaggtgcgcacactgatgggcaccgtttttgagaagcccctgctggaccatctcaatgctctcttggccatgggaattgccctccctggtgtggtcaacctccactatgtcgcccctgagatctttgtctatgagggctacgtggtgatatccagtggactcttctaccagagc

SEQ ID NO: 5751 - DNA, 924 bp, Homo Sapiens
tccctctctggatataattatgaagtttatcactccttagaagaaattcaaaattggatgcatcatctgaataaaactcactcaggcctcattcacatgttctctattggaagatcatatgagggaagatgtctttttattttaaagctgggcagacgatcacgactcaaaagagctgtttggatagactgtggtattcatgcaagagaatggattggtcctgccttttgtcagtggtttgtaaaagaagctcttctaacatataagagtgacccagccatgagaaaaatgttgaatcatctatatttctatatcatgcctgtgtttaacgtcgatggataccattttagttggaccaatgatcgattttggagaaaaacaaggtcaaggaactcaaggtttcgctgccgtggagtggatgccaatagaaactggaaagtgaagtggtgtgatgaaggagcttctatgcacccttgtgatgacacatactgtggcccttttccagaatctgagccggaagtgaaggctgtagctaacttccttcgaaaacacagaaagcacattagggcttatctctcctttcatgcatatgctcagatgttactgtatccctattcttacaaatatgcaacaattcccaattttagatgtgtggaatctgcagcttataaagctgtgaatgcacttcagtcagtatacggggtacgatacagatatggaccagcctccacaacgttgtatgtgagctctggtagctcaatggattgggcctacaaaaatggaataccttatgcatttgctttcgaactacgtgacactggatattttggatttttactcccagagatgctcatcaaacccacctgtacagaaactatgctggctgtgaaaaatatcacaatgcacctgctaaagaaatgtccc

SEQ ID NO: 5752 - DNA, 1221 bp, Homo Sapiens
aaccacgcccacgcgccgggcacggcgcccccacctgtcgtcagcactggggctgccagcgccaacagcgccgtggtcactgtggaaagggcggacagctcgcacctcagcatcctcattgacccgcgctgccccgacctcaccgacagcttcgcacgcctggagagcgcccaggcctcggtgctgcaggcgctgacagagcaccaggcccagccacggctggtgggcgaccaggagcaggagctgctggacacgctggccgaccagctgccccggctgctggcccgagcctcagagctgcagacggagtgcatggggctgcggaaggggcatggcacgctgggccagggcctcagcgccctgcagagtgagcagggccgcctcatccagcttctctctgagagccagggccacatggctcacctggtgaactccgtcagcgacatcctggatgccctgcagagggaccgggggctgggccggccccgcaacaaggccgaccttcagagagcgcctgcccggggaacccggccccggggctgtgccactggctcccggccccgagactgtctggacgtcctcctaagcggacagcaggacgatggcgtctactctgtctttcccacccactacccggccggcttccaggtgtactgtgacatgcgcacggacggcggcggctggacggtgtttcagcgccgggaggacggctccgtgaacttcttccggggctgggatgcgtaccgagacggctttggcaggctcaccggggagcactggctagggctcaagaggatccacgccctgaccacacaggctgcctacgagctgcacgtggacctggaggactttgagaatggcacggcctatgcccgctacgggagcttcggcgtgggcttgttctccgtggaccctgaggaagacgggtacccgctcaccgtggctgactattccggcactgcaggcgactccctcctgaagcacagcggcatgaggttcaccaccaaggaccgtgacagcgaccattcagagaacaactgtgccgccttctaccgcggtgcctggtggtaccgcaactgccacacgtccaacctcaatgggcagtacctgcgcggtgcgcacgcctcctatgccgacggcgtggagtggtcctcctggaccggctggcagtactcactcaagttctctgagatgaagatccggccggtccgggaggaccgc

SEQ ID NO: 5753 - DNA, 987 bp, Homo Sapiens
tcgccattgtctgcggcgcgggcggccctgcgggtctacgcggtaggcgccgcggtgatcctggcgcagctgctgcggcgctgccgcgggggcttcctggagccagttttccccccacgacctgaccgtgtcgctatagtgacgggagggacagatggcattggctattctacagcgaagcatctggcgagacttggcatgcatgttatcatagctggaaataatgacagcaaagccaaacaagttgtaagcaaaataaaagaagaaaccttgaacgacaaagtggaatttttatactgtgacttggcttccatgacttccatccggcagtttgtgcagaagttcaagatgaagaagattcctctccatgtcctgatcaacaatgctggggtgatgatggtccctcagaggaaaaccagagatggattcgaagaacatttcggcctgaactacctagggcacttcctgctgaccaaccttctcttggatacgctgaaagagtctgggtcccctggccacagtgcgagggtggtcaccgtctcctctgccacccattacgtcgctgagctgaacatggatgaccttcagagcagtgcctgctactcaccccacgcagcctacgcccagagcaagctggcccttgtcctgttcacctaccacctccagcggctgctggcggctgagggaagccacgtgaccgccaacgtggtggaccccggggtggtcaacacggacctctacaagcacgtgttctgggccacccgtctggcgaagaagcttctcggctggttgcttttcaagacccccgatgaaggagcgtggacttccatctacgcagcagtcaccccagagctggaaggagttggtggccgttacctatacaacgagaaagagaccaagtccctccacgtcacctacaaccagaaactgcagcagcagctgtggtctaagagttgtgagatgactggggtccttgatgtgaccctg

SEQ ID NO: 5754 - DNA, 219 bp, Homo Sapiens
ctttacttcaaaatacacaacgcgctaaaagctgcaaaggaacctgaagctgtggctgtaaaaaatcacaacccagacaaggtgtggtgggccaagaacagccaggccaaaaccattgccacggagtcttgtcctgccctgcagtgctgtgaaggatatagaatgtgtgccagttttgattccctgccaccttgctgttgcgacataaatgagggcctc

SEQ ID NO: 5755 - DNA, 2223 bp, Homo Sapiens
ttaaccccagatgaactcacaaattcgtcagaaaccagattgtctttggaagacctctttaggaaagactttgtgcttcacgatccagaggctcggtggatcaatgatacagatgtggtgtataaaagcgagaatggacatgtcattaaactgaatatagaaacaaatgctaccacattattattggaaaacacaacttttgtaaccttcaaagcatcaagacattcagtttcaccagatttaaaatatgtccttctggcatatgatgtcaaacagatttttcattattcatatactgcttcatatgtgatttacaacatacacactagggaagtttgggagttaaatcctccagaagtagaggactccgtcttgcagtacgcggcctggggtgtccaagggcagcagctgatttatatttttgaaaataatatctactatcaacctgatataaagagcagttcattgcgactgacatcttctggaaaagaagaaataatttttaatgggattgctgactggttatatgaagaggaactcctgcattctcacatcgcccactggtggtcaccagatggagaaagacttgccttcctgatgataaatgactctttggtacccaccatggttatccctcggtttactggagcgttgtatcccaaaggaaagcagtatccgtatcctaaggcaggtcaaatgaacccaacaataaaattatatgttgtaaacctgtatggaccaactcacactttggagctcatgccacctgacagctttaaatcaagagaatactatatcactatggttaaatgggtaagcaataccaagactgtggtaagatggttaaaccgagctcagaacatctccatcctcacagtctgtgagaccactacaggtgcttgtagtaaaaaatatgagatgacatcagatacgtggctctctcagcagaatgaggagcccgtgttttctagagacggcagcaaattctttatgacagtgcctgttaagcaagggggacgtggagaatttcaccacatagctatgttcctcatccagagtaaaagtgagcaaattaccgtgcggcatctgacatcaggaaactgggaagtgataaagatcttggcatacgatgaaactactcaaaaaatttactttctgagcactgaatcttctcccagaggaaggcagctgtacagtgcttctactgaaggattattgaatcgccaatgcatttcatgtaatttcatgaaagaacaatgtacatattttgatgccagttttagtcccatgaatcaacatttcttattattctgtgaaggtccaagggtcccagtggtcagcctacatagtacggacaacccagcaaaatattttatattggaaagcaattctatgctgaaggaagctatcctgaagaagaagataggaaagccagaaattaaaatccttcatattgacgactatgaacttcctttacagttgtcccttcccaaagattttatggaccgaaaccagtatgctcttctgttaataatggatgaagaaccaggaggccagctggttacagataagttccatattgactgggattccgtactcattgacatggataatgtcattgtagcaagatttgatggcagaggaagtggattccagggtctgaaaattttgcaggagattcatcgaagattaggttcagtagaagtaaaggaccaaataacagctgtgaaatttttgctgaaactgccttacattgactccaaaagattaagcatttttggaaagggttatggtggctatattgcatcaatgatcttaaaatcagatgaaaagctttttaaatgtggatccgtggttgcacctatcacagacttgaaattgtatgcctcagctttctctgaaagataccttgggatgccatctaaggaagaaagcacttaccaggcagccagtgtgctacataatgttcatggcttgaaagaagaaaatatattaataattcatggaactgctgacacaaaagttcatttccaacactcagcagaattaatcaagcacctaataaaagctggagtgaattatactatgcaggtctacccagatgaaggtcataacgtatctgagaagagcaagtatcatctctacagcacaatcctcaaattcttcagtgattgtttgaaggaagaaatatctgtgctaccacaggaaccagaagaagatgaa

SEQ ID NO: 5756 - DNA, 174 bp, Homo Sapiens
caaatatatcctccacttcctgagagaacattgccattgcaccttgatatccaaggctgtaacagcacctacaatgagacaaatttgatgacaaccacagaaatgccatttactactagtgtttttcaaatatacaatgttcaaaggactccactgatggataactggtattct

SEQ ID NO: 5757 - DNA, 159 bp, Homo Sapiens
cagtggaagcagtcttcctacgcaggcgacgccatcatcactgccgtgggcctctatgaagggctctggatgtcctgcgcctcccagagcactgggcaagtgcagtgcaagctctacgactcgctgctcgccctggacggtcacatccaatcagcgcgg

SEQ ID NO: 5758 - DNA, 2811 bp, Homo Sapiens
gtctacgaagaccaagtgggcaagtttgattggagacagcaatatgttgggaaggtcaagtttgcctccttggaattttcccctggatccaagaagttggttgtagccacagagaagaatgtgattgcagcattaaattcccgaactggggagatcttgtggcgccatgttgacaagggcacggcagaaggggctgtggatgccatgctgctgcacggacaggatgtgatcactgtgtccaatggaggccgaatcatgcgttcctgggagactaacatcgggggcctgaactgggagataaccctggacagtggcagtttccaggcacttgggctggttggcctgcaggagtctgtaaggtacatcgcagtcctgaagaagactacacttgccctccatcacctctccagtgggcacctcaagtgggtggaacatctcccagaaagtgacagcatccactaccagatggtgtattcttacggctctggggtggtgtgggccctcggagttgttcccttcagccatgtgaacattgtcaagtttaatgtggaagatggagagattgttcagcaggttagggtttcaactccgtggctgcagcacctgtctggagcctgtggtgtggtggatgaggctgtcctggtgtgtcctgacccgagctcacgttccctccaaactttggctctggagacggaatgggagttgagacagatcccactgcagtctctcgacttagaatttggaagtggattccaaccccgggtcctgcctacccagcccaacccagtggacgcttcccgggcccagttcttcctgcacttgtccccaagccactatgctctgctgcagtaccattatggaacgctgagtttgcttaaaaacttcccacagactgccctagtgagctttgccaccactggggagaagacggtggctgcagtcatggcctgtcggaatgaagtgcagaaaagtagcagttctgaagatgggtcaatggggagcttttcggagaagtctagttcaaaggactctctggcttgcttcaatcagacctacaccattaacctatacctcgtggagacaggtcggcggctgctggacaccacgataacatttagcctggaacagagcggcactcggcctgagcggctgtatatccaggtgttcttgaagaaggatgactcagtgggctaccgggctttggtgcagacagaggatcatctgctacttttcctgcagcagttggcagggaaggtggtgctgtggagccgtgaggagtccctggcagaagtggtgtgcctagagatggtggacctccccctgactggggcacaggccgagctggaaggagaatttggcaaaaaggcagatggcttgctggggatgttcctgaaacgcctctcgtctcagcttatcctgctgcaagcatggacttcccacctctggaaaatgttttatgatgctcggaagccccggagtcagattaagaatgagatcaacattgacaccctggccagagatgaattcaacctccagaagatgatggtgatggtaacagcctcaggcaagctttttggcattgagagcagctctggcaccatcctgtggaaacagtatctacccaatgtcaagccagactcctcctttaaactgatggtccagagaactactgctcatttcccccatcccccacagtgcaccctgctggtgaaggacaaggagtcgggaatgagttctctgtatgtcttcaatcccatttttgggaagtggagtcaggtagctcccccagtgctgaagcgccccatcttgcagtccttgcttctcccagtcatggatcaagactacgccaaggtgttgctgttgatagatgatgaatacaaggtcacagcttttccagccactcggaatgtcttgcgacagctacatgagcttgccccttccatcttcttctatttggtggatgcagagcagggacggctgtgtggatatcggcttcgaaaggatctcaccactgagctgagttgggagctgaccattcccccagaagtacagcggatcgtcaaggtgaaggggaaacgcagcagtgagcacgttcattcccagggccgtgtgatgggggaccgcagtgtgctctacaagagcctgaaccccaacctgctggccgtggtgacagagagcacagacgcgcaccatgagcgcacctttattggcatcttcctcattgatggcgtcactgggcgtatcattcactcctctgtgcagaagaaagccaaaggccctgtccatatcgtgcattcagagaactgggtggtgtaccagtactggaacaccaaggctcggcgcaacgagtttaccgtactggagctctatgagggcactgagcaatacaacgccaccgccttcagctccctggaccgcccccagctgccccaggtcctccagcagtcctatatcttcccgtcctccatcagtgccatggaggccaccatcaccgaacggggcatcaccagccgacacctgctgattggactaccttctggagcaattctttcccttcctaaggctttgctggatccccgccgccccgagatcccaacagaacaaagcagagaggagaacttaatcccgtattctccagatgtacagatacacgcagagcgattcatcaactataaccagacagtttctcgaatgcgaggtatctacacagctccctcgggtctggagtccacttgtttggttgtggcctatggtttggacatttaccaaactcgagtctacccatccaagcagtttgacgttctgaaggat

SEQ ID NO: 5759 - DNA, 1692 bp, Homo Sapiens
tcaccagaggttaacgccggtgtttccagcatccacataaccaagcctgtgcacatcctggaggaacgcagtctcctagtgctaacgcccgctggcctgacccagatgctgaaccagacccgcttcctcatggtgcttttccacaacccatcctcaaagcaatccaggaacttggcggaagagctgggcaaagctgtggagatcatgggcaaaggcaagaatgggatcggctttggcaaagtggacattaccatagagaaggagcttcagcaggagtttgggattaccaaggccccggagttgaagctgttttttgagggcaacaggtcagagcccatcagctgcaaaggagtggttgaatctgctgccttagtcgtttggttgagacgacaaattagccagaaagcatttttgttcaacagcagcgagcaggtggcagagtttgtgatatccaggcccttggtcatcgttggcttcttccaggatttagaggaagaagtagcagagttgttctatgatgtgatcaaagactttccagagctaacgtttggagtcataacgattggcaatgtcattgggcgtttccacgtcacccttgacagcgtcctggtgttcaaaaagggaaaaattgtgaaccgccaaaagcttattaatgacagtaccaacaaacaggaactcaatcgtgtcataaaacagcaccttacagattttgtgatcgaatacaacactgagaataaggatctgatttccgagttgcacatcatgagtcacatgctgctgtttgtctccaaaagctccgagtcatatggtatcataattcagcattataagctggcatcaaaggaattccaaaacaagatccttttcatccttgtggatgcagacgaacccagaaatggacgtgtcttcaagtacttccgggtcacagaggtcgatatcccatccgtccaaatcctaaacttgagctctgacgccaggtacaaaatgccttcagatgacataacctacgaaagcctcaagaaatttggccgcagcttcctgagtaaaaatgccacaaaacatcaatccagtgaagagattccaaaatactgggaccagggactggttaagcagctcgtggggaagaacttcaacgtagtcgtctttgacaaagaaaaggacgtatttgtgatgttctatgcaccctggtctaaaaagtgcaagatgctgttcccactgttggaggaattgggcagaaaatatcaaaaccactccacaattatcattgccaagatcgatgtcacagcaaatgacattcagctgatgtacctggaccggtacccattcttcaggctgttccccagcggctctcaacaagctgtcctgtataagggagaacacaccctgaagggcttctctgacttcctggaaagccacatcaaaactaagattgaggatgaggatgagctgttgtctgttgagcaaaatgaagtgatagaagaggaagtgctagctgaggaaaaggaggtgcctatgatgaggaaagggttacctgaacagcagtcgcctgagctggagaacatgaccaagtacgtatccaagctggaagagcccgctgggaagaagaaaacatctgaggaggtggtggtggtggtggctaagccaaagggacctccagtgcaaaagaagaaaccaaaagtcaaggaagaactt

SEQ ID NO: 5760 - DNA, 780 bp, Homo Sapiens
atggcttccgcagtctgggggagtgccccctggtggggcccgccgcccccggccccagctcggccgctcacggacatcgacttctgctccggggcgcagctgcaggaattgacccagctgatccaggagctgggtgtgcaggagagctggagtgacgggcccaagccgggagccgatctcctccgggccaaggactttgtcttctctttgcttggtctagttcaccgccgggaccctcgctttcctccccaggcagagctcttgctgcttcgtggtgggattcgcgagggctccctggatctggggcatgcacccctgggtccctacgcccggggacctcactacgatgccggcttcacactcctagtgcccatgttttcactggacggcactgaactgcaactggacctggaatcctgttacgcacaggtctgcctcccagagatggtgtgcggaacccccatccgggagatgtggcaggattgcttaggacccccagtcccaggagcacgtgattcgatccaccgaacggagagcgaagaaagttccaaggactggcaaagctctgtagaccagccgcacagctacgtcactgagcacgaggcgccggtgtctttggaaaaatcgcctagtgacgtttcagcgtccgagtcgcctcagcatgacgtcgtcgaccttggctctaccgcacctttgaaaacaatgagtagtgacgtcaccaaggcagccgtcgaaagcccagtcccaaagccgtcggaggctcgggaagcgtggcccaca

SEQ ID NO: 5761 - DNA, 225 bp, Homo Sapiens
accatgttcatcagcaccgagcagactgagcgggattctgccaccgcctatcggatgactgtggaagtgctgggcacagtgctgggcacggcgatccagggacaaatcgtgggccaagcagacacgccttgtttccaggacctcaatagctctacagtagcttcacaaagtgccaaccatacacatggcaccacctcacacagggaaacgcaaaaggcatacctg

SEQ ID NO: 5762 - DNA, 1431 bp, Homo Sapiens
atagagttcacgggccttcgttctaacctgtctgggccccagcagatcagtctttttgatttgccatcggagtggtatctaaagacccgtcagagtgttcagcaatttacagtctgtcagattggattgtctgtgttttccgctattgaaggagaggcaaacaagtatatagcccattcgtgtaacttctatctcttccctacaacgtttgggattttggactcagaattctccttccaggcttccagtgttcagtttttgaatcagtatggcttcaactataacaagtttctcaaaaacggaatcccatatatgaatgaagaacaggagaagaaaattagacacgatatcctgactgggaactggagagttcgcagctctccggataaagaccaaatcaaggtggtgattgacgaagtgacgcggtggctggagctggccaaggaaggcgactggatgactcttcctgggatcactggcttccaggcctttgaggtccaactggtgctgaggcaggccctccccaacatctggacggtgctgaaagatgagggggtggtagtgaagaaagtgagtaaacaacatcgttggtatcttcagaacacctcttgtgaccgagagagctgttggaaggaaaatattcttctctcagcaaggggtttttctgtctttttccaaatgctggtgaaagcccagaagcccttagtgggacataatatgatgatggacctgctgcacctccatgagaagttcttcagacccctcccagaaagctacgatcaatttaagcagaatatccacagcctatttcctgttctcattgataccaagagtgtaacaaaggatatctggaaggagatgaatttcccgagggtgtcgaatctttcggaagtctatgaagtcctgaacagtgacttgaatcccaccaagaattctggaccagagattgttcacgcgagcaggtgtgagaaatatgttgagacaaagtgcccccacgaagccgcgtatgatgccttcctctgtgggtcagttcttttgaaagtggcacacttgcttctacagaagatataccacatcgaccccgtgcccgagtcatcctttcctcagtaccttgacgtgctggctccttacgtgaaccaagtgaacctcatccgagcgggggtcccaaagatcaatttttctggtccagattatcccagtatccgacctcccatcctcatcctcagcgtcaaaaggtggcctggggtcagcgagcagcaagtctaccataagtttcagaatctctgcaagtttgatgtcaggcgactcacaagaagccagttcttactcctgaccaataagtttaaggatgcgcggaacatcctgaaggagtaccgggaccacccgaccctgtgcatctccctgtaccgctactggaggcactccccaaac

SEQ ID NO: 5763 - DNA, 546 bp, Homo Sapiens
ttcaacctgcaggtggccacccctggggggaaagccatggaatttgtggatgtgactgagagcaatgcacgctgggtgcaagacttccgcctcaaggcttacgccagccccgccaagctcgagtccatcgatggtgcccggtaccatgccctcctgatccccagctgtcctggggccctgaccgacctggccagcagtggctccctggcccgtatcctgcagcacttccactctgagagcaaacccatctgcgccgtcggccacggtgtcgccgccctgtgctgtgccaccaacgaggacagatcctgggtgttcgacagctacagcctgacagggccctctgtgtgtgagctcgtcagggcccccggcttcgcccgcctgccgctcgtggtggaggacttcgtgaaggattcgggcgcctgcttcagtgcaagcgagcctgacgctgtccacgtcgtgctggaccgccacctggtcacaggccagaatgccagctccactgtcccggccgtgcagaacctgctcttcctctgtggcagccggaag

SEQ ID NO: 5764 - DNA, 834 bp, Homo Sapiens
catctgggggttctggggcccaagaacgtctcgcagaaagacgccgagtttgagcgcacctacgtggacgaggtcaacagcgagctggtcaacatctacaccttcaaccatactgtgacccgcaacaggacagagggcgtgcgtgtgtctgtgaacgtcctgaacaagcagaagggggcgccgttgctgtttgtggtccgccagaaggaggctgtggtgtccttccaggtgcccctaatcctgcgagggatgtttcagcgcaagtacctctaccaaaaagtggaacgaaccctgtgtcagccccccaccaagaatgagtcggagattcagttcttctacgtggatgtgtccaccctgtcaccagtcaacaccacataccagctccgggtcagccgcatggacgattttgtgctcaggactggggagcagttcagcttcaataccacagcagcacagccccagtacttcaagtatgagctccctgaaggcgtggactcggtaattgtcaaggtgacctccaacaaggccttcccctgctcagtcatctccattcaggatgtgctgtgtcctgtctatgacctggacaacaacgtagccttcatcggcatgtaccagacgatgaccaagaaggcggccatcaccgtacagcgcaaagacttccccagcaacagcttttatgtggtggtggtggtgaagaccgaagaccaagcctgcgggggctccctgcctttctaccccttcgcagaagatgaaccggtcgatcaagggcaccgccagaaaaccctgtcagtgctggtgtctcaagcagtcacgtctgaggcatacgtcagtggg

SEQ ID NO: 5765 - DNA, 1023 bp, Homo Sapiens
agccaggaggccgggaccggtgcgggcgcggggtcccttgcgggttcttgcggctgcggcacgccccagcggcctggcgcccatggcagttcggcagccgctcaccgatactcgcgggaggctaacgctccgggccccgtacccggagagcggcaactcgcgcactcaaagatggtccccatccctgctggagtatttacaatgggcacagatgatcctcagataaagcaggatggggaagcacctgcgaggagagttactattgatgccttttacatggatgcctatgaagtcagtaatactgaatttgagaagtttgtgaactcaactggctatttgacagaggctgagaagtttggcgactcctttgtctttgaaggcatgttgagtgagcaagtgaagaccaatattcaacaggcagttgcagctgctccctggtggttacctgtgaaaggcgctaactggagacacccagaagggcctgactctactattctgcacaggccggatcatccagttctccatgtgtcctggaatgatgcggttgcctactgcacttgggcagggaagcggctgcccacggaagctgagtgggaatacagctgtcgaggaggcctgcataatagacttttcccctggggcaacaaactgcagcccaaaggccagcattatgccaacatttggcagggcgagtttccggtgaccaacactggtgaggatggcttccaaggaactgcgcctgttgatgccttccctcccaatggttatggcttatacaacatagtggggaacgcatgggaatggacttcagactggtggactgttcatcattctgttgaagaaacgcttaacccaaaaggtcccccttctgggaaagaccgagtgaagaaaggtggatcctacatgtgccataggtcttattgttacaggtatcgctgtgctgctcggagccagaacacacctgatagctctgcttcgaatctgggattccgctgtgcagccgaccgcctgcccaccatggac

SEQ ID NO: 5766 - DNA, 1107 bp, Homo Sapiens
cgccagaaggagtcaggttcaaaatggaaagtatttattgaccaaattaacaggtctttggagaattacgaaccatgttcaagtcaaaactgcagctgctaccatggtgtcatagaagaggatctaactcctttccgaggaggcatctccaggaggatgatggcagaggtagtcagacggaagctagggacccactatcagatcactaagaacagactgtaccgggaaaatgactgcatgttcccctcaaggtgtagcggtgttgagcactttattttggaagtgatcgggcgtctccctgacatggagatggtgatcaatgtacgagattatcctcaggttcctaaatggatggagcctgccatcccagtcttctccttcagtaagacatcagagtaccatgatatcatgtatcctgcttggacattttgggaagggggacctgctgtttggccaatttatcctacaggtcttggacggtgggacctcttcagagaagatctggtaaggtcagcagcacagtggccatggaaaaagaaaaactctacagcatatttccgaggatcaaggacaagtccagaacgagatcctctcattcttctgtctcggaaaaacacaaaacttgttgatgcagaatacaccaaaaaccaggcctggaaatctatgaaagataccttaggaaagccagctgctaaggatgtccatcttgtggatcactgcaaatacaagtatctgtttaattttcgaggcgtagctgcaagtttccggtttaaacacctcttcctgtgtggctcacttgttttccatgttggtgatgagtggctagaattcttctatccacagctgaagccatgggttcactatatcccagtcaaaacagatctctccaatgtccaagagctgttacaatttgtaaaagcaaatgatgatgtagctcaagagattgctgaaaggggaagccagtttattaggaaccatttgcagatggatgacatcacctgttactgggagaacctcttgagtgaatactctaaattcctgtcttataatgtaacgagaaggaaaggttatgatcaaattattcccaaaatgttgaaaactgaacta

SEQ ID NO: 5767 - DNA, 843 bp, Homo Sapiens
gagtccttcgtgaagctttttattcctaagaggagaaaatcagtcaccggcgaaatcgtgctgattacaggagctgggcatggaattgggagactgactgcctatgaatttgctaaacttaaaagcaagctggttctctgggatataaataagcatggactggaggaaacagctgccaaatgcaagggactgggtgccaaggttcatacctttgtggtagactgcagcaaccgagaagatatttacagctctgcaaagaaggtgaaggcagaaattggagatgttagtattttagtaaataatgctggtgtagtctatacatcagatttgtttgctacacaagatcctcagattgaaaagacttttgaagttaatgtacttgcacatttctggactacaaaggcatttcttcctgcaatgacgaagaataaccatggccatattgtcactgtggcttcggcagctggacatgtctcggtccccttcttactggcttactgttcaagcaagtttgctgctgttggatttcataaaactttgacagatgaactggctgccttacaaataactggagtcaaaacaacatgtctgtgtcctaatttcgtaaacactggcttcatcaaaaatccaagtacaagtttgggacccactctggaacctgaggaagtggtaaacaggctgatgcatgggattctgactgagcagaagatgatttttattccatcttctatagcttttttaacaacattggaaaggatccttcctgagcgtttcctggcagttttaaaacgaaaaatcagtgttaagtttgatgcagttattggatataaaatgaaagcgcaa

SEQ ID NO: 5768 - DNA, 504 bp, Homo Sapiens
cgggctctcgagtggttctcggccgtggtaaacatcgagtacgtggacccgcagaccaacctgacggtgtggagcgtctcggagagtggccgcttcggcgacagctcgcccaaggagggcgcgcatggcctggtgggcgtcccgtgggcgcccggcggagacctcgagggctgcgcgcccgacacgcgcttcttcgtgcccgagcccggcggccgaggggccgcgccctgggtcgccctggtggctcgtgggggctgcaccttcaaggacaaggtgctggtggcggcgcggaggaacgcctcggccgtcgtcctctacaatgaggagcgctacgggaacatcaccttgcccatgtctcacgcgggaacaggaaatatagtggtcattatgattagctatccaaaaggaagagaaattttggagctggtgcaaaaaggaattccagtaacgatgaccataggggttggcacccggcatgtacaggagttcatcagcggtcagtct

SEQ ID NO: 5769 - DNA, 441 bp, Homo Sapiens
cggactgattcaccgagcccaaccgtactcaactcacatatttctaccccaaatgtgaatgctttaacacatgaaaaccaaaccaaaccttctatttcccaaatcagcaccaccctccctcccacgacgagtaccaagaaaagtggaggagcatctgtggtccctcatccctcgcctactcctctgtctcaagaggaagctgataacaatgaagatcctagtatagaggaggaggatcttctcatgctgaacagttctccatccacagccaaagacactctagacaatggcgattatggagaaccagactatgactggaccacgggccccagggacgacgacgagtctgatgacaccttggaagaaaacaggggttacatggaaattgaacagtcagtgaaatcttttaagatgccatcctcaaatatagaagaggaagac

SEQ ID NO: 5770 - DNA, 975 bp, Homo Sapiens
attgccgtggcccaaaaaacccaagatggacaaaatattggaatcaagcatattcctgcaacccagtgtggcatttgggttcgaaccagcaatggaggtcattttgcttcgccaaattatcctgactcatatccaccaaacaaggagtgtatctacattttggaagctgctccacgtcaaagaatagagttgacctttgatgaacattattatatagaaccatcatttgagtgtcggtttgatcacttggaagttcgagatgggccatttggtttctctcctcttatagatcgttactgtggcgtgaaaagccctccattaattagatcaacagggagattcatgtggattaagtttagttctgatgaagagcttgaaggactgggatttcgagcaaaatattcatttattccagatccagactttacttacctaggaggtattttaaatcccattccagattgtcagttcgagctctcgggagctgatggaatagtgcgctctagtcaggtagaacaagaggagaaaacaaaaccaggccaagccgttgattgcatctggaccattaaagccactccaaaagctaagatttatttgaggttcctagattatcaaatggagcactcaaatgaatgcaagagaaacttcgttgcagtctatgatggaagcagttctattgaaaacctgaaggccaagttttgcagcactgtggccaatgatgtaatgcttaaaacaggaattggagtgattcgaatgtgggcagatgaaggtagtcggcttagcaggtttcgaatgctctttacttcctttgtggagcctccctgcacaagcagcactttcttttgccatagcaacatgtgcatcaataattctttagtctgtaatggtgtccaaaattgtgcatacccttgggatgaaaatcattgtaaagaaaagaaaaaagcaggagtatttgaacaaatcactaagactcat

SEQ ID NO: 5771 - DNA, 549 bp, Homo Sapiens
tgggtacatggggaccccagaagagcagcctatcctacagacagccagggccacttttgtggccagaagggcactcccaatgagaacaagaccattttgttttactttaacctgttacgctgtaccagtccctccgtattgctaaacctacagtgccctaccacacagatctgtgtctccaagtgcccagaaaaatttttaacctatgtggaaatgcaacttttgtacacaaaagacaaaagctactgggaagactaccgtcagttctgtaagaccactgctaagcctgtgaagtctctcacacagcttttactggatgatgattgtccaacagcgatttttcccagcaaaccttttctccagagatgtttccctgacttctctaccaaaaatggcactttaacaataggaagtaagatgatgtttcaagatggaaatggagggacaagaagtgttgtagaactcgggattgctgcaaatggtatcaataaacttcttgatgcaaagtcacttggattgaaagtgtttgaagactatgcaagaacttgg

SEQ ID NO: 5772 - DNA, 723 bp, Homo Sapiens
gactcagaggtcatggcgagcacggtggtgaagtacctgagccaggaggaggcccaggccgtggaccaggagctatttaacgaataccagttcagcgtggaccaacttatggaactggccgggctgagctgtgctacagccatcgccaaggcatatccccccacgtccatgtccaggagcccccctactgtcctggtcatctgtggcccggggaataatggaggagatggtctggtctgtgctcgacacctcaaactctttggctacgaaccaaccatctattaccccaaaaggcctaacaagcccctcttcactgcattggtgacccagtgtcagaaaatggacatccctttccttggggaaatgcccgcagagcccatgacgattgatgaactgtatgagctggtggtggatgccatctttggcttcagcttcaagggcgatgttcgggaaccgttccacagcatcctgagtgtcctgaagggactcactgtgcccattgccagcatcgacattccctcaggatgggacgtggagaagggaaatgctggagggatccagccagacttgctcatctccctcacagcccccaaaaaatctgcaacccagtttaccggtcgctaccattacctggggggtcgttttgtgccacctgctctggaaaagaagtaccagctgaacctgccaccctaccctgacactgagtgtgtctatcgtctgcag

SEQ ID NO: 5773 - DNA, 1185 bp, Homo Sapiens
ctcgcctcttggcagcgcaacgaactgaccgaccggcgcttcctgcagctcaataagtgcccggcgtgcttcggcacgagctggtgccgccgcttcctcaacgggcaggtggtattcgaggcgtggggccgcttgcgcctgctggacttcctcaacgtgaagaacgtgtacttcgcgcagtacggcgagccccgcgagggcggccgccgccgagtggtgctcaagcgcctcggctcgcagcgcgagctggcgcagctcgaccagagcatctgcaagcgggccaccggccggccccgctgcgacctgctgcaggccatgccccggaccgagttcgcgcgcctcaacggcgacgtgcgtctgctcacgcccgaggcggtggagggctggtcggacctggtgcactgcccctcgcagcgccttctcgaccgcctggtgcgccgctacgcggagaccaaggactcgggcagcttcctgcttcgcaacctcaaggactcggagcgcatgcagctgctgctgaccctggccttcaaccccgagccgctggtgctacagagttttccgtctgatgaaggttggccatttgcaaagtatcttggagcttgtggaagaatggtggctgtaaattatgttggagaagaactgtggagttactttaatgcgccatgggaaaaacgagttgacctcgcttggcaattaatggaaatagcagaacagcttacaaacaatgactttgaatttgcactctacctcctggacgtcagctttgacaattttgcagttggtcctagagatgggaaggtaatcattgtggatgctgaaaatgttttggttgctgacaaaagattaattagacaaaataaacctgaaaattgggatgtatggtatgaaagcaagtttgatgactgtgataaggaggcttgcttatcattttcaaaagaaattctttgtgctcgtgccactgtggaccacaattactatgctgtttgtcagaacctcttatccagacatgccacctggcgtggcacttctggaggactccttcatgatccaccaagtgaaattgccaaagatggccggctcgaggccttgctggatgagtgtgccaacccaaagaagcgctatggcagattccaggctgcaaaagaactgcgtgaatacctagcacaattaagtaacaacgtgagg

SEQ ID NO: 5774 - DNA, 144 bp, Homo Sapiens
atgaattatacagagtccagcccattgagagaatcaactgccataggttttacacctgagttagaaagtatcatacctgtgccttccaataagaccacttgtgaaaactggagagagatacatcatctggtttttcatgtagca

SEQ ID NO: 5775 - DNA, 213 bp, Homo Sapiens
ctccatcccactggaaacataacaggcttaccaggcagtaaacggtcacaaccacccagaaacatcaccaaagagcccaaagtgttctttcataaaacccagttgcctgggattcaaggggctgcctcgagatccacggctgcatcccctacgaaccccatgaaattcctgaggaataaagcaataattcggcatagacctgctcttgttaaa

SEQ ID NO: 5776 - DNA, 1554 bp, Homo Sapiens
caggattcgactcaggcctccactccaggcagccctctctctcctaccgaatacgaacgcttcttcgcactgctgactccaacctggaaggcagagactacctgccgtctccgtgcaacccacggctgccggaatcccacactcgtccagctggaccaatatgaaaaccacggcttagtgcccgatggtgctgtctgctccaacctcccttatgcctcctggtttgagtctttctgccagttcactcactaccgttgctccaaccacgtctactatgccaagagagtcctgtgttcccagccagtctctattctctcacctaacactctcaaggagatagaagcttcagctgaagtctcacccaccacgatgacctcccccatctcaccccacttcacagtgacagaacgccagaccttccagccctggcctgagaggctcagcaacaacgtggaagagctcctacaatcctccttgtccctgggaggccaggagcaagcgccagagcacaagcaggagcaaggagtggagcacaggcaggagccgacacaagaacacaagcaggaagaggggcagaaacaggaagagcaagaagaggaacaggaagaggagggaaagcaggaagaaggacaggggactaaggagggacgggaggctgtgtctcagctgcagacagactcagagcccaagtttcactctgaatctctatcttctaacccttcctcttttgctccccgggtacgagaagtagagtctactcctatgataatggagaacatccaggagctcattcgatcagcccaggaaatagatgaaatgaatgaaatatatgatgagaactcctactggagaaaccaaaaccctggcagcctcctgcagctgccccacacagaggccttgctggtgctgtgctattcgatcgtggagaatacctgcatcataacccccacagccaaggcctggaagtacatggaggaggagatccttggtttcgggaagtcggtctgtgacagccttgggcggcgacacatgtctacctgtgccctctgtgacttctgctccttgaagctggagcagtgccactcagaggccagcctgcagcggcaacaatgcgacacctcccacaagactccctttgtcagccccttgcttgcctcccagagcctgtccatcggcaaccaggtagggtccccagaatcaggccgcttttacgggctggatttgtacggtgggctccacatggacttctggtgtgcccggcttgccacgaaaggctgtgaagatgtccgagtctctgggtggctccagactgagttccttagcttccaggatggggatttccctaccaagatttgtgacacagactatatccagtacccaaactactgttccttcaaaagccagcagtgtctgatgagaaaccgcaatcggaaggtgtcccgcatgagatgtctgcagaatgagacttacagtgcgctgagccctggcaaaagtgaggacgttgtgcttcgatggagccaggagttcagcaccttgactctaggccagttcgga

SEQ ID NO: 5777 - DNA, 177 bp, Homo Sapiens
gaagacgggaagaatgactccctgccgtctgagtccacgtcgcacaggtggcgggggcctgcctgcaggccccccgatagctcctacaacagcctgtactccacctgcctggagctgttcaagttcaccatcggcatgggcgacctggagttcactgagaactatgacttcaaggct

SEQ ID NO: 5778 - DNA, 275 bp, Homo Sapiens
tctcgccaggactgaagtgtgtatgtcttttgtgtgattcttcaaactttacctgccaaacagaaggagcatgttgggcatcagtcatgctaaccaatggaaaagagcaggtgatcaaatcctgtgtctcccttccagaactgaatgctcaagtcttctgtcatagttccaacaatgttaccaaaaccgaatgctgcttcacagatttttgcaacaacataacactgcaccttccaacagcatcaccaaatgccccaaaacttggacccatggag

SEQ ID NO: 5779 - DNA, 153 bp, Homo Sapiens
aaattcaaggagatctgtgaacgtccaaatggctcctgtcgggacttttgccttgaaacagaaatccatgttgggagatgtttaaatagccaaccctgctgcctgcctctggggcatcaaccaagaattgagagcactacacccaaaaaggac

SEQ ID NO: 5780 - DNA, 198 bp, Homo Sapiens
agcttctggaacaaagatccctttctagatatgataagagaaactgagcagtgctgggtacagcctccatataagtactgtgagaaaaggtgtactaaaataatgacttgtgtacgtccaaatcatacatgctgctggacctactgtggaaacatctgcttagacaacgaagagccccttaaatcaatgctaaacccc

SEQ ID NO: 5781 - DNA, 186 bp, Homo Sapiens
gaaatgaggaagaaaagatatgacaggaaggaattgttacttgaagaatgctggggaaagccaaatgtcaaagaatgtaccaataagtgttctaaagcctttagatgtaaagacaaaaattacacatgctgctggacctattgtggaaacatctgctggataaacgtcgaaaccagtggagattac

SEQ ID NO: 5782 - DNA, 774 bp, Homo Sapiens
aggaagtctgcagcctgcgggcagccccgcatgtccagtcggatcgttgggggccgggatggccgggacggagagtggccgtggcaggcgagcatccagcatcgtggggcacacgtgtgcggggggtcgctcatcgccccccagtgggtgctgacagcggcgcactgcttccccaggagggcactgccagctgagtaccgcgtgcgcctgggggcgctgcgtctgggctccacctcgccccgcacgctctcggtgcccgtgcgacgggtgctgctgcccccggactactccgaggacggggcccgcggcgacctggcactgctgcagctgcgtcgcccggtgcccctgagcgctcgcgtccaacccgtctgcctgcccgtgcccggcgcccgcccgccgcccggcacaccatgccgggtcaccggctggggcagcctccgcccaggagtgcccctcccagagtggcgaccgctacaaggagtaagggtgccgctgctggactcgcgcacctgcgacggcctctaccacgtgggcgcggacgtgccccaggctgagcgcattgtgctgcctgggagtctgtgtgccggctacccccagggccacaaggacgcctgccagggtgattctgggggacctctgacctgcctgcagtctgggagctgggtcctggtgggcgtggtgagctggggcaagggttgtgccctgcccaaccgtccaggggtctacaccagtgtggccacatatagcccctggattcaggctcgcgtcagcttc

SEQ ID NO: 5783 - DNA, 162 bp, Homo Sapiens
atggcagcccagaatggaaacaccagtttcacacccaactttaatccaccccaagaccatgcctcctccctctcctttaacttcagttatggtgattatgacctccctatggatgaggatgaggacatgaccaagacccggaccttcttcgcagccaagatc

SEQ ID NO: 5784 - DNA, 1305 bp, Homo Sapiens
gaccctggggcactgctgcggttgggcatggacatcatgaaccaggtccagagcgccatggatgagagtcatatcctggagaagatggcagccgaggcaggcaagaaacagccagggatgaaacctatcaagggcatcaccaatttgaaggtgaaggatgtccagctgcccgtcatcacactgaactttgtacctggagtgggcatcttccaatgtgtgtccacaggcatgaccgtcactggcaagagcttcatgggagggaacatggagatcatcgtggccctgaacatcacagccaccaaccggcttctgcgggatgaggagacaggcctccccgtgttcaagagtgagggctgtgaggtcatcctggtcaatgtgaagactaacctgcctagcaacatgctccccaagatggtcaacaagttcctggacagcaccctgcacaaagtcctccctgggctgatgtgtcccgccatcgatgcagtcctggtgtatgtgaacaggaagtggaccaacctcagtgaccccatgcctgtgggccagatgggcaccgtcaaatatgttctgatgtccgcaccagccaccacagccagctacatccaactggacttcagtcctgtggtgcagcagcaaaagggcaaaaccatcaagcttgctgatgccggggaggccctcacgttccctgagggttatgccaaaggctcgtcgcagctgctgctcccagccaccttcctctctgcagagcttgcccttctgcagaagtcctttcatgtgaatatccaggatacaatgattggtgagctgcccccacaaaccaccaagaccctggctcgcttcattcctgaagtggctgtagcttatcccaagtcaaagcccttgacgacccagatcaagataaagaagcctcccaaggtcactatgaagacaggcaagagcctgctgcacctccacagcaccctggagatgttcgcagctcggtggcggagcaaggctccaatgtccctctttctcctagaagtgcacttcaatctgaaggtccagtactcagtgcacgagaaccagctgcagatggccacttctttggacagattactgagcttgtcccggaagtcctcatcgattggcaacttcaatgagagggaattaactggcttcatcaccagctatctcgaagaagcctacatcccagttgtcaatgatgtgcttcaagtggggctcccactcccggactttctggccatgaattacaatctggctgagctggacatagtagagaatgccctgatgctggacttgaagctgggc

SEQ ID NO: 5785 - DNA, 204 bp, Homo Sapiens
ttcccagtctctcaagaccaggaacgagaaaaaagaagtatcagtgacagcgatgaattagcttcagggttttttgtgttcccttacccatatccatttcgcccacttccaccaattccatttccaagatttccatggtttagacgtaattttcctattccaatacctgaatctgcccctacaactccccttcctagcgaaaag

SEQ ID NO: 5786 - DNA, 168 bp, Homo Sapiens
tactttaggggatacaagccaagatccacagatttgattctcaggcacctgactgtagctgactccttggttatcctatctaaaagaatcccagagaccatggcaacttttgggttgaaacattttgacaattattttggatgcaaatttcttttgtatgcacacagg

SEQ ID NO: 5787 - DNA, 360 bp, Homo Sapiens
gaggagcctgcagccagcttctcccaacccggcagcatgggcctggataagaacacagtgcacgaccaagagcatatcatggagcatctagaaggtgtcatcaacaaaccagaggcggagatgtcgccacaagaattgcagctccattacttcaaaatgcatgattatgatggcaataatttgcttgatggcttagaactctccacagccatcactcatgtccataaggaggaagggagtgaacaggcaccactaatgagtgaagatgaactgattaacataatagatggtgttttgagagatgatgacaagaacaatgatggatacattgactatgctgaatttgcaaaatcactgcag

SEQ ID NO: 5788 - DNA, 549 bp, Homo Sapiens
gaagcatcagaaagcacaatgaagataattaaagaagaatttacagacgaagagatgcaatatgacatggcaaaaagtggccaagaaaaacagaccattgagatattaatgaacccgatcctgttagttaaaaataccagcctcagcatgtccaaggatgatatgtcttccacattactgacattcagaagtttacattataatgaccccaagggaaacagttcgggtaatgacaaagagtgttgcaatgacatgacagtctggagaaaagtttcagaagcaaacggatcgtgcaagtggagcaataacttcatccgcagctccacagaagtgatgcgcagggtccacagggcccccagctgcaagtttgtacagaatcctggcataagctgctgtgagagcctagaactggaaaatacagtgtgccagttcactacaggcaaacaattccccaggtgccaataccatagtgttacctcattagagaagatattgacagtgctgacaggtcattctctgatgagctggttagtttgtggctctaagttg

SEQ ID NO: 5789 - DNA, 162 bp, Homo Sapiens
cagccctactggatcggcgacagcgtcaacacaccgcaggcaggctacttcggccttttctcctactgcgtgggtaacgtgctgtcctccgagctcatctgcaagggcggccccctagacttctcctccatcccctctagagccttcaagactgccatgttc

SEQ ID NO: 5790 - DNA, 579 bp, Homo Sapiens
tacttcgatggccccctctacccagagatgtccaatgggactctgcaccactacttcgtgcccgatggggactatgaggagaacgatgaccccgagaagtgccagctgctcttcagggtgagtgaccacaggcgctgctcccagggggaggggagccaggttggcagcctgctgagcctcaccctgcgggaggagttcaccgtgctgggccgccaggtggaggatgctgggcgcgtgctggagggcatcagcaaaagcatctcctacgacctagacggggaagagagctatggcaagtacctgcggcgggagtcccaccagatcggggatgcctactccaactcggacaaatccctcactgagctggagagcaagttcaagcagggccaggaacaggacagccggcaggagagcaggctcaacgaggactttctgggaatgctggtccacaccaggtccctgctgaaggagacactggacatctctgtggggctcagggacaaatacgagctgctggccctcaccattaggagccatgggacccgactaggtcggctgaaaaatgattatcttaaagta

SEQ ID NO: 5791 - DNA, 369 bp, Homo Sapiens
gccatcagctgggagctggacaacgtgctgatgcctagtcccagaatctggccccaggtgactccaacaggcaggtctgcctctgtcaggagtgagggtaacacctcctcactctggaatttctcagctgggcaggatgtgcatgccatagtaaccagaacctgtgagtctgtgctgagctctgccgtctacacccacggctgtggctgtgtgaggtctgccacaaacattacctgtcagtcctcaggacaacaaaggcaggcggcccggcaggaagaggagaactcaatctgcaaggcccatgatagtagagagggccgcctgggctaccccctcagtgcccatcagcctggttccggtggtcctaac

SEQ ID NO: 5792 - DNA, 1065 bp, Homo Sapiens
cgagaaagggatcatgaactacgtcacagaaggcatcatcaccaatcacccaaatctcactttgaattaccacattatcctggactgctagctcaccagaagccgttcattagaaagtcctataaatgtctgcacaaacgctgtaggcctaagcttccaccttcacctaataacccccccaaattcccaaatcctcaccagccacctaaacatccagataaaaatagcagtgtggtcaaccctaccttagtggctacaacccaaattccatctgtgactttcccatcagcttccaccaaaattactacccttccaaatgtgacttttcttccccagaatgccaccaccatatcttcaagagaaaatgttaacacaagctcttctgtagctacattagcaccagtgaattccccagctccacaagacaccacagctgccccacccacaccttctgcaactacaccagctccaccatcttcctcagctccaccagagaccacagctgccccacccacaccttctgcaactacacaagctccaccatcttcctcagctccaccagagaccacagctgccccacccacacctcctgcaactacaccagctccaccatcttcctcagctccaccagagaccacagctgccccacccacaccttctgcaactacaccagctccactatcttcctcagctccaccagagaccacagctgtcccacccacaccttctgcaactaccctagacccatcatccgcctcagctccaccagagaccacagctgccccacccacaccttctgcaactacaccagctccaccgtcttccccagctccacaagagaccacagctgccccaattaccacacctaattcttccccaactactcttgcacctgacacttctgaaacttcagctgcacccacacaccagactattacttcggtcactactcaaactactactactaaacaaccaacttcagctcctggccaaaataaaatttctcgatttcttttatatatgaagaatctactaaacagaattattgacgacatggtggagcaa

SEQ ID NO: 5793 - DNA, 2226 bp, Homo Sapiens
atgcctgctggagggaaaggaagccatccttcatctacaccccagagggtccccaaccgcctgatccacgagaagtcaccatacctcctacaacatgcctacaatcctgtggactggtacccctggggagaggaagccttcgacaaggccaggaaggaaaacaagccgattttcctctcagtcgggtactccacctgccactggtgccacatgatggaagaggagtccttccagaatgaggagattggccgcctgctcagtgaggactttgtgagtgtgaaggtagaccgtgaggagcggcctgacgtggacaaggtgtacatgacgttcgtgcaggccaccagcagcggcgggggctggcccatgaatgtgtggctgactcccaacctccagccctttgtcgggggcacctatttccctcctgaggatggcttgacccgagtcggcttccgcacagtgttgctgagaatacgagaacagtggaaacagaacaagaacaccctgctagaaaatagccagcgtgtcaccactgccctgctggcccgatcagagatcagcgtgggtgaccgccagctgccgccctctgccgccaccgtgaacaatcgctgcttccagcagctggatgagggctatgatgaggaatacggtggcttcgctgaggcccccaagtttcccacgccggtgatcctgagcttcctgttctcctactggctcagccatcgactgactcaggatggctctcgggcccagcagatggccttgcataccctgaaaatgatggctaacgggggcatccgggaccatgtggggcagggctttcaccgctactccacagaccgccagtggcacgtccctcactttgagaagatgctctatgaccaggcacagctcgctgtggcctattcgcaggccttccagctctctggtgatgaattctactctgacgtggccaaaggcatcctgcagtacgtggctcggagcctgagccaccggtccggaggcttctatagcgcagaggatgcagactcgcccccagagcggggccagcggcccaaagagggcgcctactatgtgtggacggtcaaagaggttcagcagctcctcccggagcctgtgttgggtgccaccgagccgctgacctcaggccagctcctcatgaagcactacggcctcacagaggctggtaacatcagccccagtcaggaccccaagggggagctgcagggccagaatgtgctgaccgtccggtactcgctggagctgactgctgcccgctttggcttggatgtggaggccgtgcggaccttgctcaatacagggctggagaagctcttccaggcccggaagcatcggcccaagccgcacctggacagcaagatgctggctgcctggaatggcttgatggtgtcaggctatgctgtgactggggctgtcctgggccaagacaggctgatcaactatgccaccaatggtgccaagttcctgaagcggcacatgtttgatgtggccagtggccgcctgatgcggacctgctacaccggccctggggggactgtggagcacagcaacccaccctgctggggcttcctggaggactacgccttcgtggtgcggggcctgctggacctgtatgaggcctcacaggagagtgcgtggctcgagtgggctctgcggctgcaggacacacaggacaggctcttttgggactcccagggtggcggctacttctgcagtgaggctgagctgggggctggcctgcccctgcgtctgaaggacgaccaggatggagcagagcccagcgccaattccgtgtcagcccacaacctgctccggctgcatggcttcacgggccacaaggactggatggacaagtgtgtgtgcctattgaccgccttttccgagcgcatgcgtcgtgtcccggtggcgttgcccgagatggtccgcgccctctcagcccagcagcagaccctcaagcagatcgtgatctgtggagaccgtcaggccaaggacaccaaggccctggtgcagtgcgtccactctgtctacattcctaacaaggtgctgattctggctgatggggacccctcgagcttcctgtcccgccagctgcctttcctgagtaccctccgacggttggaagaccaggccactgcatatgtgtgtgagaatcaagcctgctcagtgcccatcactgatccctgcgaattacgaaaactactacatcca

SEQ ID NO: 5794 - DNA, 1599 bp, Homo Sapiens
ctgcacaacgtcacggccgagctctttggggccgaggcctggggcacccttgcggctttcggggacctcaactccgacaagcagacggatctcttcgtgctgcgggaaagaaatgacttaatcgtctttttggcagaccagaatgcaccctattttaaacccaaagtaaaggtatctttcaagaatcacagtgcattgataacaagtgtagtccctggggattatgatggagattctcaaatggatgtccttctgacatatcttcccaaaaattatgccaagagtgaattaggagctgttatcttctggggacaaaatcaaacattagatcctaacaatatgaccatactcaataggacttttcaagatgagccactaattatggatttcaatggtgatctaattcctgatatttttggtatcacaaatgaatccaaccagccacagatactattaggagggaatttatcatggcatccagcattgaccactacaagtaaaatgcgaattccacattctcatgcatttattgatctgactgaagattttacagcagatttattcctgacgacattgaatgccaccactagtaccttccagtttgaaatatgggaaaatttggatggaaacttctctgtcagtactatattggaaaaacctcaaaatatgatggtggttggacagtcagcatttgcagactttgatggagatggacacatggatcatttactgccaggctgtgaagataaaaattgccaaaagagtaccatctacttagtgagatctgggatgaagcagtgggttccagtcctacaagatttcagcaataagggcacactctggggctttgtgccatttgtggatgaacagcaaccaactgaaataccaattccaattacccttcatattggagactacaatatggatggctatccagacgctctggtcatactaaagaacacatctggaagcaaccagcaggcctttttactggagaacgtcccttgtaataatgcaagctgtgaagaggcgcgtcgaatgtttaaagtctactgggagctgacagacctaaatcaaattaaggatgccatggttgccaccttctttgacatttacgaagatggaatcttggacattgtagtgctaagtaaaggatatacaaagaatgattttgccattcatacactaaaaaataactttgaagcagatgcttattttgttaaagttattgttcttagtggtctgtgttctaatgactgtcctcgtaagataacaccctttggagtgaatcaacctggaccttatatcatgtatacaactgtagatgcaaatgggtatctgaaaaatggatcagctggccaactcagccaatccgcacatttagctctccaactaccatacaacgtgcttggtttaggtcggagcgcaaattttcttgaccatctctacgttggtattccccgtccatctggagaaaaatctatacgaaaacaagagtggactgcaatcattccaaattcccagctaattgtcattccataccctcacaatgtccctcgaagttggagtgccaaactgtatcttacaccaagtaatatt

SEQ ID NO: 5795 - DNA, 282 bp, Homo Sapiens
ctggcagtcctgctgcaggcagccgaggccgcgccaggtcttgggcctcctgaccctagaccacggacattaccgccgctgccaccgggccctacccctgcccagcagccgggccgtggtctggctgaagctgcggggccgcggggctccgagggaggcaatggcagcaaccctgtggccgggcttgagacggacgatcacggagggaaggccggggaaggctcggtgggtggcggccttgctgtgagccccaaccctggcgacaagcccatgacccagcgg

SEQ ID NO: 5796 - DNA, 279 bp, Homo Sapiens
atggccaaccacaacctgctgcagatcttcacagccgccacccctgtccaccactgtcgcccgccccacaatgcctccacagggccttgggtgctccccatgggcccaaatgggaagcctgagaggtgcctccgttttgtacatccgcccaatgccagcctgcccaatgacacccagagggccatggagccatgcctggatggctgggtctacaacagcaccaaggactccattgtgacagagtgggacttggtgtgcaactccaacaaactgaaggag

SEQ ID NO: 5797 - DNA, 1539 bp, Homo Sapiens
atgactcctgaatcaagggatactacagatttgtctccagggggtacccaggagatggaaggcatcgtgatagtgaaggtggaggaggaagatgaagaagaccattttcaaaaggaaagaaacaaagtagagtcatcgccacaagttctcagtcgctctacaactatgaatgagagagccttattgtcatcgtatttagttgcatatagagtggcaaaagagaaaatggctcacacagcggctgaaaaaattatccttccagcatgtatggacatggtacggacaatttttgatgacaaatcagctgataaactaagaactatacctcttagtgataatacaatatctcgtcgaatctgtacgattgcaaaacatttggaagcaatgcttattacacggctgcagtccggtatagactttgcaatccaactcgatgagagcactgatattgcaagttgtcccacactcttggtttatgtcagatatgtgtggcaagatgattttgtagaggatctcttatgttgtttaaatttaaattcacatataactggattagatttatttactgaattagaaaactgccttcttggtcagtataaattaaactggaaacattgtaaaggaatttcaagtgatggaacagcaaatatgaccggaaaacacagcagacttactgaaaaattgttagaagcaacccacaacaatgctgtttggaatcactgttttattcatcgagaagctttggtatccaaagaaatttcaccaagtctgatggatgtattgaaaaatgcagtgaaaactgttaattttattaaaggaagctcactgaatagccgacttctcgaaatattttgttcagagattggagtgaaccacacccacttattgtttcatacagaagttcgttggctttctcaaggaaaagtattgagcagagtatatgaactcaggaacgagatttacatttttctcgttgaaaagcaatctcatttggcaaatatttttgaagacgacatttgggtaacaaaattggcatatttaagtgatatttttggcattcttaatgaattaagcctgaaaatgcaggggaaaaacaatgatatatttcagtatcttgaacatattctaggattccaaaagacgttattattgtggcaagcaagacttaaaagtaaccgccctagctactatatgtttccaacattattgcaacacatcgaagagaacattattaatgaagactgcttaaaagaaataaaattagagatattgttgcatctcacttctttgtctcaaacttttaattattactttccggaagagaaatttgaatcattaaaggaaaatatttggatgaaagatccatttgcttttcaaaacccagaatcaataattgagttaaacttggagcctgaagaagagaatgaattattgcagctcagttcatcattcacactaaagaattattataagatattaagtttatcagcattttggattaagattaaagatgactttccactgctaagtaggaagagt

SEQ ID NO: 5798 - DNA, 900 bp, Homo Sapiens
cagttcaacggctacaactgtgatgccaacctccacagtagatttcctgctgagagagacatcagtgtctattgtggagtgcaggctattacgatgaagattaatttttgcacggtacttttctcgggttattcggaaacagatctggcactgaatggaaggcatggggactcccactgcagagggttcatcaataacaacacctttccagcagtggtcatttttatcatcaatctcagcaccttggagggctgtggaaacaacctggtggtatccacaattcctggagtcagtgcttatggaaatgcaacttcagtgcaagtaggaaatatttcaggatatattgatactccagacccaccaacaatcatcagctatctacctgggcttctttacaaatttagttgtagttatccattggaatacctggttaataatacccagcttgcttcgtcctcagcggctatttctgtgagagagaacaatggcacatttgtcagcactttgaacctgctcctttataacgattcaacctacaaccagcagttaattatccccagtataggattacctttgaaaaccaaagtatttgcagctgtccaagccactaatttggatggcagatggaatgttttaatggattattgctatactaccccatcaggaagcccaaatgatgacattcgatatgatcttttccttagctgtgacaaggaccctcagaccaccgtcattgagaatggccgaagccagcggggccggttttcttttgaagtgttccgatttgtgaaacacaagaatcagaaaatgtccactgtcttcttgcactgcgttaccaagctctgcagagcagatgactgccccttccttatgccgatttgcagccacagagaaaggaga

SEQ ID NO: 5799 - DNA, 186 bp, Homo Sapiens
atggagaccaccatggggttcatggatgacaatgccaccaacacttccaccagcttcctttctgtgctcaaccctcatggagcccatgccacttccttcccattcaacttcagctacagcgactatgatatgcctttggatgaagatgaggatgtgaccaattccaggacgttctttgctgccaag

SEQ ID NO: 5800 - DNA, 480 bp, Homo Sapiens
gactttgatgattttaacctggaggatgcagtgaaagaaacttcctcagtaaagcagccatgggaccacaccaccaccaccacaaccaataggccaggaaccaccagagctccggcaaaacctccaggtagtggattggacttggctgatgctttggatgatcaagatgatggccgcaggaaaccgggtataggaggaagagagagatggaaccatgtaaccaccacgaccaagaggccagtaaccaccagagctccagcaaatactttaggaaatgattttgacttggctgatgccctggatgatcgaaatgatcgagatgatggccgcaggaaaccaattgctggaggaggaggtttttcagacaaggatcttgaagacatagtagggggtggagaatacaaacctgacaagggtaaaggtgatggccggtacggcagcaatgacgaccctggatctggcatggtggcagagcctggc

SEQ ID NO: 5801 - DNA, 435 bp, Homo Sapiens
attgcaataaaaaaggaaaagaggcctcctcagacactctcaagaggatggggagatgacatcacttgggtacaaacttatgaagaaggtctcttttatgctcaaaaaagtaagaagccattaatggttattcatcacctggaggattgtcaatactctcaagcactaaagaaagtatttgcccaaaatgaagaaatacaagaaatggctcagaataagttcatcatgctaaaccttatgcatgaaaccactgataagaatttatcacctgatgggcaatatgtgcctagaatcatgtttgtagacccttctttaacagttagagctgacatagctggaagatactctaacagattgtacacatatgagcctcgggatttacccctattgatagaaaacatgaagaaagcattaagacttattcagtcagagcta

SEQ ID NO: 5802 - DNA, 585 bp, Homo Sapiens
cactctctttgcttcaacttcactataaaatcattgtccagacctggacagccctggtgtgaagcgcaggtcttcttgaataaaaatcttttccttcagtacaacagtgacaacaacatggtcaaacctctgggcctcctggggaagaaggtaaatgccaccagcacttggggagagttgacccaaacgctgggagaagtggggcgagacctcaggatgctcctttgtgacatcaaaccccagataaagaccagtgatccttccactctgcaagtcgagatgttttgtcaacatgaagcagaacggtgcactggtgcatcctggcagttcaccatcaatggagagaaatccctcctctttgacgcaatgaacatgacctggacagtaattaatcatgaagccagtaagatcaaggagacatggaagaaagacagagggctggaaaagtatttcaggaagctctcaaagggagactgcgatcactggctcagggaattcttagggcactgggaggcaatgccagaaccgacagtgtcaccagtaaatgcttcagatatccactggtcttcttctagtctaccagat

SEQ ID NO: 5803 - DNA, 300 bp, Homo Sapiens
aacatccacatgaacttcacccatatctgcagaagccacaattctatcaaccagtccttggatgagtctgtgatttatggaccaggaaacctgtcaaccaacaacaatactctcagagaccacttcaaagggatttcttcccatagcagaagctcactcatgcccctgagaaatgatgtggataagagaggggagacgacctcagcatccttgctaaatgctggattaagccacactgaataccagatagtcacagaccctggggacgtcccagcttttttgaaatggctgtccttagcc

SEQ ID NO: 5804 - DNA, 381 bp, Homo Sapiens
aagcccaaggacatgacatcatctcagtggtttaaaactcagcatgtgcagcccagccctcaagcatgcaactcagccatgagcatcatcaataagtacacagaacggtgcaaagacctcaacaccttcctgcacgagcccttctccagtgtggccatcacctgccagacccccaacatagcctgcaagaatagctgtaaaaactgccaccagagccacgggcccatgtccctgaccatgggtgagctcacctcagggaagtacccaaactgcaggtacaaagagaagcacctgaacacaccttacatagtggcctgtgaccctccacaacagggtgacccagggtacccacttgttcctgtgcacttggataaagttgtc

SEQ ID NO: 5805 - DNA, 1389 bp, Homo Sapiens
accctcagtcccactgcagttctcatcctcggcccaaaagtcatcaaagaaaagctgacacaggagctgaaggaccacaacgccaccagcatcctgcagcagctgccgctgctcagtgccatgcgggaaaagccagccggaggcatccctgtgctgggcagcctggtgaacaccgtcctgaagcacgtcatctggctgaaggtcatcacagctaacatcctccagctgcaggtgaagccctcggccaatgaccaggagctgctagtcaagatccccctggacatggtggctggattcaacacgcccctggtcaagaccatcgtggagttccacatgacgactgaggcccaagccaccatccgcatggacaccagtgcaagtggccccacccgcctggtcctcagtgactgtgccaccagccatgggagcctgcgcatccaactgctgcataagctctccttcctggtgaacgccttagctaagcaggtcatgaacctcctagtgccatccctgcccaatctagtgaaaaaccagctgtgtcccgtgatcgaggcttccttcaatggcatgtatgcagacctcctgcagctggtgaaggtgcccatttccctcagcattgaccgtctggagtttgaccttctgtatcctgccatcaagggtgacaccattcagctctacctgggggccaagttgttggactcacagggaaaggtgaccaagtggttcaataactctgcagcttccctgacaatgcccaccctggacaacatcccgttcagcctcatcgtgagtcaggacgtggtgaaagctgcagtggctgctgtgctctctccagaagaattcatggtcctgttggactctgtgcttcctgagagtgcccatcggctgaagtcaagcatcgggctgatcaatgaaaaggctgcagataagctgggatctacccagatcgtgaagatcctaactcaggacactcccgagttttttatagaccaaggccatgccaaggtggcccaactgatcgtgctggaagtgtttccctccagtgaagccctccgccctttgttcaccctgggcatcgaagccagctcggaagctcagttttacaccaaaggtgaccaacttatactcaacttgaataacatcagctctgatcggatccagctgatgaactctgggattggctggttccaacctgatgttctgaaaaacatcatcactgagatcatccactccatcctgctgccgaaccagaatggcaaattaagatctggggtcccagtgtcattggtgaaggccttgggattcgaggcagctgagtcctcactgagcaaggatgcccttgtgcttactccagcctccttgtggaaacccacctctcctgtctcccag

SEQ ID NO: 5806 - DNA, 255 bp, Homo Sapiens
tgtccgcgccgcttcctggaggagctgggctactggggcgtgcggctcaagtacacgccacgctgctgccgcatctgcttcgaggagcggcgcgacgagctgagcgaacggctcaagatccagcacgagctgcgcgcgcaggcgcaggtcgaggaggcggaggaactcttccgcgacatgcgcttctacggcccgcagcggcgccgcctctggaacctcatggagaagccgttctcctcggtggccgccaaggcc

SEQ ID NO: 5807 - DNA, 1641 bp, Homo Sapiens
gagccggctgagaactcggacttctacctgcctggggattacctcctgggtggcctcttctccctccatgccaacatgaagggcattgttcaccttaacttcctgcaggtgcccatgtgcaaggagtatgaagtgaaggtgataggctacaacctcatgcaggccatgcgctttgcggtggaggagatcaacaatgacagcagcctgctgcctggtgtgctgctgggctatgagatcgtggatgtgtgctacatctccaacaatgtccagccggtgctctacttcctggcacacgaggacaacctccttcccatccaagaggactacagtaactacatttcccgtgtggtggctgtcattggccctgacaactccgagtctgtcatgactgtggccaacttcctctccctatttctccttccacagatcacctacagcgccatcagcgatgagctgcgagacaaggtgcgcttcccggctttgctgcgtaccacacccagcgccgaccaccacatcgaggccatggtgcagctgatgctgcacttccgctggaactggatcattgtgctggtgagcagcgacacctatggccgcgacaatggccagctgcttggcgagcgcgtggcccggcgcgacatctgcatcgccttccaggagacgctgcccacactgcagcccaaccagaacatgacgtcagaggagcgccagcgcctggtgaccattgtggacaagctgcagcagagcacagcgcgcgtcgtggtcgtgttctcgcccgacctgaccctgtaccacttcttcaatgaggtgctgcgccagaacttcactggcgccgtgtggatcgcctccgagtcctgggccatcgacccggtcctgcacaacctcacggagctgcgccacttgggcaccttcctgggcatcaccatccagagcgtgcccatcccgggcttcagtgagttccgcgagtggggcccacaggctgggccgccacccctcagcaggaccagccagagctatacctgcaaccaggagtgcgacaactgcctgaacgccaccttgtccttcaacaccattctcaggctctctggggagcgtgtcgtctacagcgtgtactctgcggtctatgctgtggcccatgccctgcacagcctcctcggctgtgacaaaagcacctgcaccaagagggtggtctacccctggcagctgcttgaggagatctggaaggtcaacttcactctcctggaccaccaaatcttcttcgacccgcaaggggacgtggctctgcacttggagattgtccagtggcaatgggaccggagccagaatcccttccagagcgtcgcctcctactaccccctgcagcgacagctgaagaacatccaagacatctcctggcacaccatcaacaacacgatccctatgtccatgtgttccaagaggtgccagtcagggcaaaagaagaagcctgtgggcatccacgtctgctgcttcgagtgcatcgactgccttcccggcaccttcctcaaccacactgaagatgaatatgaatgccaggcctgcccgaataacgagtggtcctaccagagtgagacctcctgcttcaagcggcagctggtcttcctggaatggcatgaggcacccacc

SEQ ID NO: 5808 - DNA, 2616 bp, Homo Sapiens
aacgctatccggctcaccagcgagcacacggtggagaccctggtggtggccgacgccgacatggtgcagtaccacggggccgaggccgcccagaggttcatcctgaccgtcatgaacatggtatacaatatgtttcagcaccagagcctggggattaaaattaacattcaagtgaccaagcttgtcctgctacgacaacgtcccgctaagttgtccattgggcaccatggtgagcggtccctggagagcttctgtcactggcagaacgaggagtatggaggagcgcgatacctcggcaataaccaggttcccggcgggaaggacgacccgcccctggtggatgctgccgtgtttgtgaccaggacagatttctgtgtacacaaggatgaaccgtgtgacactgttggaattgcttacttaggaggtgtgtgcagtgctaagaggaagtgtgtgcttgccgaagacaatggtctcaatttggcctttaccatcgcccatgagctgggccacaacttgggcatgaaccacgacgatgaccactcatcttgcgctggcaggtcccacatcatgtcaggagagtgggtgaaaggccggaacccaagtgacctctcttggtcctcctgcagccgagatgaccttgaaaacttcctcaagtcaaaagtcagcacctgcttgctagtcacggaccccagaagccagcacacagtacgcctcccgcacaagctgccgggcatgcactacagtgccaacgagcagtgccagatcctgtttggcatgaatgccaccttctgcagaaacatggagcatctaatgtgtgctggactgtggtgcctggtagaaggagacacatcctgcaagaccaagctggaccctcccctggatggcaccgagtgtggggcagacaagtggtgccgcgcgggggagtgcgtgagcaagacgcccatcccggagcatgtggacggagactggagcccgtggggcgcctggagcatgtgcagccgaacatgtgggacgggagcccgcttcaggcagaggaaatgtgacaaccccccccctgggcctggaggcacacactgcccgggtgccagtgtagaacatgcggtctgcgagaacctgccctgccccaagggtctgcccagcttccgggaccagcagtgccaggcacacgaccggctgagccccaagaagaaaggcctgctgacagccgtggtggttgacgataagccatgtgaactctactgctcgcccctcgggaaggagtccccactgctggtggccgacagggtcctggacggtacaccctgcgggccctacgagactgatctctgcgtgcacggcaagtgccagaaaatcggctgtgacggcatcatcgggtctgcagccaaagaggacagatgcggggtctgcagcggggacggcaagacctgccacttggtgaagggcgacttcagccacgcccgggggacagctctcaaagactcgggtaaggggtccatcaacagtgactggaagatagagctccccggagagttccagattgcaggcacaactgttcgctatgtgagaagggggctgtgggagaagatctctgccaagggaccaaccaaactaccgctgcacttgatggtgttgttatttcacgaccaagattatggaattcattatgaatacactgttcctgtaaaccgcactgcggaaaatcaaagcgaaccagaaaaaccgcaggactctttgttcatctggacccacagcggctgggaagggtgcagtgtgcagtgcggcggaggggagcgcagaaccatcgtctcgtgtacacggattgtcaacaagaccacaactctggtgaacgacagtgactgccctcaagcaagccgcccagagccccaggtccgaaggtgcaacttgcacccctgccagtcacggtgggtggcaggcccgtggagcccctgctcggcgacctgtgagaaaggcttccagcaccgggaggtgacctgcgtgtaccagctgcagaacggcacacacgtcgctacgcggcccctctactgcccgggcccccggccggcggcagtgcagagctgtgaaggccaggactgcctgtccatctgggaggcgtctgagtggtcacagtgctctgccagctgtggtaaaggggtgtggaaacggaccgtggcgtgcaccaactcacaagggaaatgcgacgcatccacgaggccgagagccgaggaggcctgcgaggactactcaggctgctacgagtggaaaactggggactggtctacgtgctcgtcgacctgcgggaagggcctgcagtcccgggtggtgcagtgcatgcacaaggtcacagggcgccacggcagcgagtgccccgccctctcgaagcctgccccctacagacagtgctaccaggaggtctgcaacgacaggatcaacgccaacaccatcacctccccccgccttgctgctctgacctacaaatgcacacgagaccagtggacggtatattgccgggtcatccgagaaaagaacctctgccaggacatgcggtggtaccagcgctgctgccagacctgcagggacttctatgcaaacaagatgcgccagccaccgccgaactcg

SEQ ID NO: 5809 - DNA, 2835 bp, Homo Sapiens
tctcttctgaggtcccatagaaatgaagaactgaacgtggagaccttggtggtggtcgacaaaaagatgatgcaaaaccatggccatgaaaatatcaccacctacgtgctcacgatactcaacatggtatctgctttattcaaagatggaacaataggaggaaacatcaacattgcaattgtaggtctgattcttctagaagatgaacagccaggactggtgataagtcaccacgcagaccacaccttaagtagcttctgccagtggcagtctggattgatggggaaagatgggactcgtcatgaccacgccatcttactgactggtctggatatatgttcctggaagaatgagccctgtgacactttgggatttgcacccataagtggaatgtgtagtaaatatcgcagctgcacgattaatgaagatacaggtcttggactggccttcaccattgcccatgagtctggacacaactttggcatgattcatgatggagaagggaacatgtgcaaaaagtccgagggcaacatcatgtcccctacattggcaggacgcaatggagtcttctcctggtcaccctgcagccgccagtatctacacaaatttctaagcaccgctcaagctatctgccttgctgatcagccaaagcctgtgaaggaatacaagtatcctgagaaattgccaggagaattatatgatgcaaacacacagtgcaagtggcagttcggagagaaagccaagctctgcatgctggactttaaaaaggacatctgtaaagccctgtggtgccatcgtattggaaggaaatgtgagactaaatttatgccagcagcagaaggcacaatttgtgggcatgacatgtggtgccggggaggacagtgtgtgaaatatggtgatgaaggccccaagcccacccatggccactggtcggactggtcttcttggtccccatgctccaggacctgcggagggggagtatctcataggagtcgcctctgcaccaaccccaagccatcgcatggagggaagttctgtgagggctccactcgcactctgaagctctgcaacagtcagaaatgtccccgggacagtgttgacttccgtgctgctcagtgtgccgagcacaacagcagacgattcagagggcggcactacaagtggaagccttacactcaagtagaagatcaggacttatgcaaactctactgtatcgcagaaggatttgatttcttcttttctttgtcaaataaagtcaaagatgggactccatgctcggaggatagccgtaatgtttgtatagatgggatatgtgagagagttggatgtgacaatgtccttggatctgatgctgttgaagacgtctgtggggtgtgtaacgggaataactcagcctgcacgattcacaggggtctctacaccaagcaccaccacaccaaccagtattatcacatggtcaccattccttctggagcccggagtatccgcatctatgaaatgaacgtctctacctcctacatttctgtgcgcaatgccctcagaaggtactacctgaatgggcactggaccgtggactggcccggccggtacaaattttcgggcactactttcgactacagacggtcctataatgagcccgagaacttaatcgctactggaccaaccaacgagacactgattgtggagctgctgtttcagggaaggaacccgggtgttgcctgggaatactccatgcctcgcttggggaccgagaagcagccccctgcccagcccagctacacttgggccatcgtgcgctctgagtgctccgtgtcctgcggagggggacagatgaccgtgagagagggctgctacagagacctgaagtttcaagtaaatatgtccttctgcaatcccaagacacgacctgtcacggggctggtgccttgcaaagtatctgcctgtcctcccagctggtccgtggggaactggagtgcctgcagtcggacgtgtggcgggggtgcccagagccgccccgtgcagtgcacacggcgggtgcactatgactcggagccagtcccggccagcctgtgccctcagcctgctccctccagcaggcaggcctgcaactctcagagctgcccacctgcatggagcgccgggccctgggcagagtgctcacacacctgtgggaaggggtggaggaagcgggcagtggcctgtaagagcaccaacccctcggccagagcgcagctgctgcccgacgctgtctgcacctccgagcccaagcccaggatgcatgaagcctgtctgcttcagcgctgccacaagcccaagaagctgcagtggctggtgtccgcctggtcccagtgctctgtgacatgtgaaagaggaacacagaaaagattcttaaaatgtgctgaaaagtatgtttctggaaagtatcgagagctggcctcaaagaagtgctcacatttgccgaagcccagcctggagctggaacgtgcctgcgccccgcttccatgccccaggcaccccccatttgctgctgcgggaccctcgaggggcagctggtttgcctcaccctggtctcagtgcacggccagctgtgggggaggcgttcagacgaggtccgtgcagtgcctggctgggggccggccggcctcaggctgcctcctgcaccagaagccttcggcctccctggcctgcaacactcacttctgccccattgcagagaagaaagatgccttctgcaaagactacttccactggtgctacctggtaccccagcacgggatgtgcagccacaagttctacggcaagcagtgctgcaagacttgctctaagtccaacttg

SEQ ID NO: 5810 - DNA, 2214 bp, Homo Sapiens
ttcgtgtctatcccgcggtacgtggagacgctggtggtcgcggacgagtcaatggtcaagttccacggcgcggacctggaacattatctgctgacgctgctggcaacggcggcgcgactctaccgccatcccagcatcctcaaccccatcaacatcgttgtggtcaaggtgctgcttcttagagatcgtgactccgggcccaaggtcaccggcaatgcggccctgacgctgcgcaacttctgtgcctggcagaagaagctgaacaaagtgagtgacaagcaccccgagtactgggacactgccatcctcttcaccaggcaggacctgtgtggagccaccacctgtgacaccctgggcatggctgatgtgggtaccatgtgtgaccccaagagaagctgctctgtcattgaggacgatgggcttccatcagccttcaccactgcccacgagctgggccacgtgttcaacatgccccatgacaatgtgaaagtctgtgaggaggtgtttgggaagctccgagccaaccacatgatgtccccgaccctcatccagatcgaccgtgccaacccctggtcagcctgcagtgctgccatcatcaccgacttcctggacagcgggcacggtgactgcctcctggaccaacccagcaagcccatctccctgcccgaggatctgccgggcgccagctacaccctgagccagcagtgcgagctggcttttggcgtgggctccaagccctgtccttacatgcagtactgcaccaagctgtggtgcaccgggaaggccaagggacagatggtgtgccagacccgccacttcccctgggccgatggcaccagctgtggcgagggcaagctctgcctcaaaggggcctgcgtggagagacacaacctcaacaagcacagggtggatggttcctgggccaaatgggatccctatggcccctgctcgcgcacatgtggtgggggcgtgcagctggccaggaggcagtgcaccaaccccacccctgccaacgggggcaagtactgcgagggagtgagggtgaaataccgatcctgcaatctggagccctgccccagctcagcctccggaaagagcttccgggaggagcagtgtgaggctttcaacggctacaaccacagcaccaaccggctcactctcgccgtggcatgggtgcccaagtactccggcgtgtctccccgggacaagtgcaagctcatctgccgagccaatggcactggctacttctatgtgctggcacccaaggtggtggacggcacgctgtgctctcctgactccacctccgtctgtgtccaaggcaagtgcatcaaggctggctgtgatgggaacctgggctccaagaagagattcgacaagtgtggggtgtgtgggggagacaataagagctgcaagaaggtgactggactcttcaccaagcccatgcatggctacaatttcgtggtggccatccccgcaggcgcctcaagcatcgacatccgccagcgcggttacaaagggctgatcggggatgacaactacctggctctgaagaacagccaaggcaagtacctgctcaacgggcatttcgtggtgtcggcggtggagcgggacctggtggtgaagggcagtctgctgcggtacagcggcacgggcacagcggtggagagcctgcaggcttcccggcccatcctggagccgctgaccgtggaggtcctctccgtggggaagatgacaccgccccgggtccgctactccttctatctgcccaaagagcctcgggaggacaagtcctctcatcccaaggacccccggggaccctctgtcttgcacaacagcgtcctcagcctctccaaccaggtggagcagccggacgacaggccccctgcacgctgggtggctggcagctgggggccgtgctccgcgagctgcggcagtggcctgcagaagcgggcggtggactgccggggctccgccgggcagcgcacggtccctgcctgtgatgcagcccatcggcccgtggagacacaagcctgcggggagccctgccccacctgggagctcagcgcctggtcaccctgctccaagagctgcggccggggatttcagaggcgctcactcaagtgtgtgggccacggaggccggctgctggcccgggaccagtgcaacttgcaccgcaagccccaggagctggacttctgcgtcctgaggccgtgc

SEQ ID NO: 5811 - DNA, 2811 bp, Homo Sapiens
tcagctggaaaatcacaaaagggcctcaatgtggaaaccctcgtggtggcagacaagaaaatggtggaaaagcatggcaagggaaatgtcaccacatacattctcacagtaatgaacatggtttctggcctatttaaagatgggactattggaagtgacataaacgtggttgtggtgagcctaattcttctggaacaagaacctggaggattattgatcaaccatcatgcagaccagtctctgaatagtttttgtcaatggcagtctgccctcattggaaagaatggcaagagacatgatcatgccatcttactaacaggatttgatatttgttcttggaagaatgaaccatgtgacactctagggtttgcccccatcagtggaatgtgctctaagtaccgaagttgtaccatcaatgaggacacaggacttggccttgccttcaccatcgctcatgagtcagggcacaactttggtatgattcacgacggagaagggaatccctgcagaaaggctgaaggcaatatcatgtctcccacactgaccggaaacaatggagtgttttcatggtcttcctgcagccgccagtatctcaagaaattcctcagcacacctcaggcggggtgtctagtggatgagcccaagcaagcaggacagtataaatatccggacaaactaccaggacagatttatgatgctgacacacagtgtaaatggcaatttggagcaaaagccaagttatgcagccttggttttgtgaaggatatttgcaaatcactttggtgccaccgagtaggccacaggtgtgagaccaagtttatgcccgcagcagaagggaccgtttgtggcttgagtatgtggtgtcggcaaggccagtgcgtaaagtttggggagctcgggccccggcccatccacggccagtggtccgcctggtcgaagtggtcagaatgttcccggacatgtggtggaggagtcaagttccaggagagacactgcaataaccccaagcctcagtatggtggcatattctgtccaggttctagccgtatttatcagctgtgcaatattaacccttgcaatgaaaatagcttggattttcgggctcaacagtgtgcagaatataacagcaaacctttccgtggatggttctaccagtggaaaccctatacaaaagtggaagaggaagatcgatgcaaactgtactgcaaggctgagaactttgaatttttttttgcaatgtccggcaaagtgaaagatggaactccctgctccccaaacaaaaatgatgtttgtattgacggggtttgtgaactagtgggatgtgatcatgaactaggctctaaagcagtttcagatgcttgtggcgtttgcaaaggtgataattcaacttgcaagttttataaaggcctgtacctcaaccagcataaagcaaatgaatattatccggtggtcatcattccagctggcgcccgaagcatcgaaatccaggagctgcaggtttcctccagttacctcgcagttcgaagcctcagtcaaaagtattacctcaccgggggctggagcatcgactggcctggggagttccccttcgctgggaccacgtttgaataccagcgctctttcaaccgcccggaacgtctgtacgcgccagggcccacaaatgagacgctggtctttgaaattctgatgcaaggcaaaaatccagggatagcttggaagtatgcacttcccaaggtcatgaatggaactccaccagccacaaaaagacctgcctatacctggagtatcgtgcagtcagagtgctccgtctcctgtggtggaggttacataaatgtaaaggccatttgcttgcgagatcaaaatactcaagtcaattcctcattctgcagtgcaaaaaccaagccagtaactgagcccaaaatctgcaacgctttctcctgcccggcttactggatgccaggtgaatggagtacatgcagcaaggcctgtgctggaggccagcagagccgaaagatccagtgtgtgcaaaagaagcccttccaaaaggaggaagcagtgttgcattctctctgtccagtgagcacacccactcaggtccaagcctgcaacagccatgcctgccctccacaatggagccttggaccctggtctcagtgttccaagacctgtggacgaggggtgaggaagcgtgaactcctctgcaagggctctgccgcagaaaccctccccgagagccagtgtaccagtctccccagacctgagctgcaggagggctgtgtgcttggacgatgccccaagaacagccggctacagtgggtcgcttcttcgtggagcgagtgttctgcaacctgtggtttgggtgtgaggaagagggagatgaagtgcagcgagaagggcttccagggaaagctgataactttcccagagcgaagatgccgtaatattaagaaaccaaatctggacttggaagagacctgcaaccgacgggcttgcccagcccatccagtgtacaacatggtagctggatggtattcattgccgtggcagcagtgcacagtcacctgtgggggaggggtccagacccggtcagtccactgtgttcagcaaggccggccttcctcaagttgtctgctccatcagaaacctccggtgctacgagcctgtaatacaaacttctgtccagctcctgaaaagagagaggatccatcctgcgtagatttcttcaactggtgtcacctagttcctcagcatggtgtctgcaaccacaagttttacggaaaacaatgctgcaagtcatgcacaaggaagatc

SEQ ID NO: 5812 - DNA, 507 bp, Homo Sapiens
gctgaagcagtgtggaccgcgtacctcaacgtgtcctggcgggttccgcacacgggagtgaaccgtacggtgtgggagctgagcgaggagggcgtgtacggccaggactcgccgctggagcctgtggctggggtcctggtaccgcccgacgggcccggggcgcttaacgcctgtaacccgcacacgaatttcacggtgcccacggtttggggaagcaccgtgcaagtctcttggttggccctcatccaacgcggcgggggctgcaccttcgcagacaagatccatctggcttatgagagaggggcgtctggagccgtcatctttaacttccccgggacccgcaatgaggtcatccccatgtctcacccgggtgcagtagacattgttgcaatcatgatcggcaatctgaaaggcacaaaaattctgcaatctattcaaagaggcatacaagtgacaatggtcatagaagtagggaaaaaacatggcccttgggtgaatcactattca

SEQ ID NO: 5813 - DNA, 192 bp, Homo Sapiens
ttgaaccctcagaagccactgtatagctcctgccttagtgtggagaagtgttaccagcaaaaagactggcagcgtttactgctctctccccttcaccatgctgatgattggcatttgtatttcaatatggcatccatgctctggaaaggaataaatctagaaagaagactgggaagtagatggtttgcctat

SEQ ID NO: 5814 - DNA, 849 bp, Homo Sapiens
tcctctccctgcatcatggagaagaaagacctcggccccaagcctgctctcattggccaccgcggggcccccatgctggctccagagcacacgctcatgtccttccggaaggccctcgagcagaagctgtacgggctccaggctgacattaccatcagcctggacggcgtgcccttcctcatgcatgacaccaccctgcggcgcaccaccaacgtggaggaggagttcccggagctggcccgcaggcctgcctccatgcttaactggaccaccctgcagagactcaacgctggccagtggttcctgaagactgtccccttctggacagccagctccctgtcaccctccgaccacagagaggcccagaaccagtccatctgcagcctggcagagctcctggagctggccaagggcaatgccacactgctgctcaacctgcgtgacccgccccgggagcacccctaccgcagcagttttatcaacgtgactctggaggccgtgctgcactccggcttcccccagcaccaggtcatgtggctgcctagcaggcagaggcccctggtgcggaaggtggctcccggcttccaacagacatcaggctccaaggaggcagtcgccagcctgcggagaggccacatccagcggctgaacctgcgctacactcaggtgtcccgccaggagctcagggactacgcgtcctggaacctgagtgtgaacctctacacagtcaacgcaccgtggctcttctccctgctgtggtgtgcgggggtcccatccgtcacctctgacaactcccacaccctgtcccaggtgccttcccccctctggatcatgcccccggacgagtac

SEQ ID NO: 5815 - DNA, 1233 bp, Homo Sapiens
ccgtcgctcatcaagcagcaggtccttaagaacgtgcgcatcgaccccagtagcctgtccttcaacatgtggaaggagatccctatccccttctatctctccgtctacttctttgacgtcatgaaccccagcgagatcctgaagggcgagaagccgcaggtgcgggagcgcgggccctacgtgtacagggagttcaggcacaaaagcaacatcaccttcaacaacaacgacaccgtgtccttcctcgagtaccgcaccttccagttccagccctccaagtcccacggctcggagagcgactacatcgtcatgcccaacatcctggtcttgggtgcggcggtgatgatggagaataagcccatgaccctgaagctcatcatgaccttggcattcaccaccctcggcgaacgtgccttcatgaaccgcactgtgggtgagatcatgtggggctacaaggacccccttgtgaatctcatcaacaagtactttccaggcatgttccccttcaaggacaagttcggattatttgctgagctcaacaactccgactctgggctcttcacggtgttcacgggggtccagaacatcagcaggatccacctcgtggacaagtggaacgggctgagcaaggttgacttctggcattccgatcagtgcaacatgatcaatggaacttctgggcaaatgtggccgcccttcatgactcctgagtcctcgctggagttctacagcccggaggcctgccgatccatgaagctaatgtacaaggagtcaggggtgtttgaaggcatccccacctatcgcttcgtggctcccaaaaccctgtttgccaacgggtccatctacccacccaacgaaggcttctgcccgtgcctggagtctggaattcagaacgtcagcacctgcaggttcagtgcccccttgtttctctcccatcctcacttcctcaacgctgacccggttctggcagaagcggtgactggcctgcaccctaaccaggaggcacactccttgttcctggacatccacccggtcacgggaatccccatgaactgctctgtgaaactgcagctgagcctctacatgaaatctgtcgcaggcattggacaaactgggaagattgagcctgtggtcctgccgctgctctggtttgcagagagcggggccatggagggggagactcttcacacattctacactcagctggtgttgatgcccaaggtgatgcactat

SEQ ID NO: 5816 - DNA, 501 bp, Homo Sapiens
gacagggcgccactcacagccacagccccacaactggatgatgaggagatgtactcagcccacatgcccgctcacctgcgctgtgatgcctgcagagctgtggcttaccagatgtggcaaaatctggcaaaggcagagaccaaacttcatacctcaaactctggggggcggcgggagctgagcgagttggtctacacggatgtcctggaccggagctgctcccggaactggcaggactacggagttcgagaagtggaccaagtgaaacgtctcacaggcccaggacttagcgaggggccagagccaagcatcagcgtgatggtcacagggggcccctggcctaccaggctctccaggacatgtttgcactacttgggggagtttggagaagaccagatctatgaagcccaccaacaaggccgaggggctctggaggcattgctatgtgggggaccccagggggcctgctcagagaaggtgtcagccacaagagaagagctc

SEQ ID NO: 5817 - DNA, 1194 bp, Homo Sapiens
caaatccagcagggaggtccagatgaaaaagaaaagactaccgcactgaaagatttattatctaggatagatttggatgaactaatgaaaaaagatgaaccgcctcttgattttcctgataccctgggaggatttgaatatgcttttaatgaaaagggacagttaagacacataaaaactggggaaccatttgtttttaactaccgggaagatttacacagatggaaccagaaaagatacgaggctctaggagagatcatcacgaagtatgtatatgagctcctggaaaaggattgtaatttgaaaaaagtatctattccagtagatgccactgagagtgaaccaaagagttttatctttatgagtgaggatgctttgacaaatccacagaaactgatggttttaattcatggtagtggtgttgtcagggcagggcagtgggctagaagacttattataaatgaagatctggacagtggcacacagataccgtttattaaaagagctgtggctgaaggatatggagtaatagtactaaatcccaatgaaaactatattgaagtagaaaagccgaagatacacgtacagtcatcatctgatagttcagatgaaccagcagaaaaacgggaaagaaaagataaagtttctaaagaaacaaagaagcgacgtgatttctatgagaagtatcgtaacccccaaagagaaaaagaaatgatgcaattgtatatcagagaaaatggttctcctgaagaacatgcaatctatgtttgggatcatttcatagctcaggctgctgctgagaatgtgtttttcgttgctcacagctatggaggacttgcttttgttgaactgatgattcaacgagaagccgatgtaaaaaataaggtaactgctgtggcattgacagactctgttcacaatgtgtggcatcaagaagctggcaaaacgattcgagaatggatgagagagaactgttgtaattgggtctctagctcagaaccattagacacatcagtggagtccatgctacctgattgcccccgggtctcagcaggcaccgaccgtcacgagctaacttcctggaagagctttccgtctattttcaaattctttaccgaagcctcagaggccaagaccagctccctgaagccggctgtgacgcgccgctcccaccgcatcaagcacgaagatctg

SEQ ID NO: 5818 - DNA, 726 bp, Homo Sapiens
gcacggcttatgggctggtggggtccccgcgctggctttcgccttttcataccggaggagctgtctcgctaccgcggcggcccaggggacccgggcctgtacttggcgttgctcggccgtgtctacgatgtgtcctccggccggaggcactacgagcctgggtcccactatagcggcttcgcaggccgagacgcatccagagctttcgtgaccggggactgttctgaagcaggcctcgtggatgacgtatccgacctgtcagccgctgagatgctgacacttcacaattggctttcattctatgagaagaattatgtgtgtgttgggagggtgacaggacggttctacggagaggatgggctgcccaccccggcactgacccaggtagaagctgcgatcaccagaggcttggaggccaacaaactacagctgcaagagaagcagacattcccgccgtgcaacgcggagtggagctcagccaggggcagccggctctggtgctcccagaagagtggaggtgtgagcagagactggattggcgtccccaggaagctgtataagccaggtgctaaggagccccgctgcgtgtgtgtgagaaccaccggcccccctagtggccagatgccggacaaccctccacacagaaatcgtggggacctggaccacccaaacttggcagagtacacaggctgcccaccgctagccatcacatgctcctttccactc

SEQ ID NO: 5819 - DNA, 2616 bp, Homo Sapiens
gcgacattcatctcgatgcagctgaaaaagacctcagaggtggacctggccaagccgctggtgaagttcatccagcagacttacccaagcggcggggaagagcaggcccagtactgccgcgcggcggaggagctcagcaagctgcgccgcgccgcagtcggtcgtccgctggacaagcacgagggcgcgctcgagacgctcctgagatattatgatcagatttgttctattgaacccaaattcccattttctgaaaatcagatctgcttgacatttacctggaaggatgctttcgataaaggttcactttttggaggctctgtaaaactggctcttgcaagcttaggatatgaaaagagctgtgtgttgttcaattgtgcagccttagctagccaaattgcagcagaacagaacctggataatgatgaaggattgaaaatcgctgctaaacattaccagtttgctagtggtgcctttttacatattaaagagacggttttatctgccttaagtcgagagccgaccgtggacatatctccagatactgttgggaccctcagtcttattatgctggcacaggctcaagaagtattttttttaaaagccacaagagataaaatgaaagatgccatcatagctaaattggctaatcaggctgcagattattttggtgatgctttcaaacagtgtcaatacaaagatactctccccaagtatttttatttccaggaggtgttccctgtcttggctgcaaagcactgtatcatgcaggccaatgctgagtaccatcagtctatcctggcaaaacagcagaagaaatttggagaagaaattgcaaggttacagcatgcagcagaactgattaaaacagtggcatctcgctatgatgaatatgttaatgtgaaggatttttctgacaaaatcaatcgtgcccttgctgcagcaaagaaggataatgacttcatttatcatgatcgagttccagaccttaaagatctagatcctattggcaaagccacacttgtgaaatctaccccggtcaatgtacccatcagtcagaaatttactgatctgtttgagaagatggttcccgtgtcagtacagcagtctttggctgcctataatcagaggaaagccgatttgattaacagatcaattgctcagatgagagaagccaccactttggcaaatggggtgctagcttcccttaatcttccagcagcaattgaagatgtgtctggagacactgtacctcagtctatattgactaaatccagatctgtgattgaacagggaggcatccagactgttgatcagttgattaaagaactgcctgaattactgcaacgaaatagagaaatcctagatgagtcattaaggttgttggatgaagaagaagcaaccgataatgatttaagagcaaaatttaaggaacgttggcaaaggacaccatccaatgaactgtataagcctttaagagcagagggaaccaacttcagaacagttttagataaagctgtgcaggcagatggacaagtgaaagaatgctaccagtctcatcgtgacaccatcgtgcttttgtgtaagccagagcctgagctgaatgctgccatcccttctgctaatccagcaaagaccatgcagggcagtgaggttgtaaatgtcttaaaatccttattgtcaaatcttgatgaagtaaagaaggaaagagagggtctggagaatgacttgaaatctgtgaattttgacatgacaagcaagtttttgacagccctggctcaagatggtgtgataaatgaagaagctctttctgttactgaactagatcgagtctatggaggtcttacaactaaagtccaagaatctctaaagaaacaggagggacttcttaaaaatattcaggtctcacatcaggaattttcaaaaatgaaacaatctaataatgaagctaacttaagagaagaagttttgaagaatttagctactgcatatgacaactttgttgaacttgtagctaatttgaaggaaggcacaaagttttacaatgagttgactgaaatcctggtcaggttccagaacaaatgcagtgatatagtttttgcacggaagacagaaagagatgaactcttaaaggacttgcaacaaagcattgccagagaacctagtgctccttcaattcctacacctgcgtatcagtcctcaccagcaggaggacatgcaccaactcctccaactccagcgccaagaaccatgccgcctactaagccccagcccccagccaggcctccaccacctgtgcttccagcaaatcgagctccttctgctactgctccatctccagtgggggctgggactgctgcgccagctccatcacaaacgcctggctcagctcctcctccacaggcgcagggaccaccctatcccacctatccaggatatcctgggtattgccaaatgcccatgcccatgggctataatccttatgcgtatggccagtataatatgccatatccaccagtgtatcaccagagtcctggacaggctccatacccgggaccccagcagccttcataccccttccctcagcccccacagcagtcttactatccacagcag

SEQ ID NO: 5820 - DNA, 780 bp, Homo Sapiens
tgtcccaggatgaagagaaaaattgaacgagaaataaagtgtagtccttctgaaagccccttaatggaaaaaaagaatagcttgaaagaagaccatgaagaaacaaagttgtctgttggtgatattgaaaacaagcatcctgtttctgaggtagggcctgccactgtgcccctccaggctgtggtggaggagagaacagtctcattcaaacttggagatttggaggaagctccagagagagagaggcttcccagcgtggacttgaaagaggaaaccagcatagatagcaccgtgaatggtgcagtgcagttgcctaatgggaaccttgtccagttcagtcaagccgtcagcaaccaaataaactccagtggccactaccagtatcacaccgtgcataaggattccggcctgtacaaagagctactccataaattacatcttgccaaggtgggagattgcatgggagactccggtgacaaacccttaaggcgcaataatagctatacttcctataccatggcaatatgtggcatgcctctggattcattccgtgccaaagaaggtgaacagaagggcgaagaaatggagaagctgacatggcctaatgcagactccaagaagcgaattcgaatggacagttacaccagttactgcaatgctgtgtctgaccttcactcagcatctgagatagacatgagtgtcaaggcagagatgggtctaggtgacagaaaaggaagtaatggctctctagaagaatggtatgaccaggataagcctgaa

SEQ ID NO: 5821 - DNA, 840 bp, Homo Sapiens
acagatgaggctaatacttacttcaaggaatggacctgttcttcgtctccatctctgcccagaagctgcaaggaaatcaaagacgaatgtcctagtgcatttgatggcctgtattttctccgcactgagaatggtgttatctaccagaccttctgtgacatgacctctgggggtggcggctggaccctggtggccagcgtgcacgagaatgacatgcgtgggaagtgcacggtgggcgatcgctggtccagtcagcagggcagcaaagcagtctacccagagggggacggcaactgggccaactacaacacctttggatctgcagaggcggccacgagcgatgactacaagaaccctggctactacgacatccaggccaaggacctgggcatctggcacgtgcccaataagtcccccatgcagcactggagaaacagctccctgctgaggtaccgcacggacactggcttcctccagacactgggacataatctgtttggcatctaccagaaatatccagtgaaatatggagaaggaaagtgttggactgacaacggcccggtgatccctgtggtctatgattttggcgacgcccagaaaacagcatcttattactcaccctatggccagcgggaattcactgcgggatttgttcagttcagggtatttaataacgagagagcagccaacgccttgtgtgctggaatgagggtcaccggatgtaacactgagcaccactgcattggtggaggaggatactttccagaggccagtccccagcagtgtggagatttttctggttttgattggagtggatatggaactcatgttggttacagc

SEQ ID NO: 5822 - DNA, 345 bp, Homo Sapiens
caagaatatgaggatgaagaaagactgggagaggatgaatattatcaggtggtctattattatacagtcacccccagttatgatgactttagtgcagatttcaccattgattactccatatttgagtcagaggacaggctgaacaggttggataaggacataacagaagcaatagagactaccattagtcttgaaacagcacgtgcagaccatccgaagcctgtaactgtgaaaccagtaacaacggaacctagcccagatctgaacgatgccgtgtccagtttgcgaagtcctattcccctcctcctgtcgtgtgcctttgttcaggtggggatgtatttcatg

SEQ ID NO: 5823 - DNA, 1653 bp, Homo Sapiens
ggagacaggagacccttgcctgtagacagagctgcaggtttgaaggaaaagaccctgattctacttgatgtgagcaccaagaacccagtcaggacagtcaatgagaacttcctctctctgcagctggatccgtccatcattcatgatggctggctcgatttcctaagctccaagcgcttggtgaccctggcccggggactttcgcccgcctttctgcgcttcgggggcaaaaggaccgacttcctgcagttccagaacctgaggaacccggcgaaaagccgcgggggcccgggcccggattactatctcaaaaactatgaggatgacattgttcgaagtgatgttgccttagataaacagaaaggctgcaagattgcccagcaccctgatgttatgctggagctccaaagggagaaggcagctcagatgcatctggttcttctaaaggagcaattctccaatacttacagtaatctcatattaacagccaggtctctagacaaactttataactttgctgattgctctggactccacctgatatttgctctaaatgcactgcgtcgtaatcccaataactcctggaacagttctagtgccctgagtctgttgaagtacagcgccagcaaaaagtacaacatttcttgggaactgggtaatgagccaaataactatcggaccatgcatggccgggcagtaaatggcagccagttgggaaaggattacatccagctgaagagcctgttgcagcccatccggatttattccagagccagcttatatggccctaatattgggcggccgaggaagaatgtcatcgccctcctagatggattcatgaaggtggcaggaagtacagtagatgcagttacctggcaacattgctacattgatggccgggtggtcaaggtgatggacttcctgaaaactcgcctgttagacacactctctgaccagattaggaaaattcagaaagtggttaatacatacactccaggaaagaagatttggcttgaaggtgtggtgaccacctcagctggaggcacaaacaatctatccgattcctatgctgcaggattcttatggttgaacactttaggaatgctggccaatcagggcattgatgtcgtgatacggcactcattttttgaccatggatacaatcacctcgtggaccagaattttaacccattaccagactactggctctctctcctctacaagcgcctgatcggccccaaagtcttggctgtgcatgtggctgggctccagcggaagccacggcctggccgagtgatccgggacaaactaaggatttatgctcactgcacaaaccaccacaaccacaactacgttcgtgggtccattacactttttatcatcaacttgcatcgatcaagaaagaaaatcaagctgactgggactctcagagacaagctggttcaccagtacctgctgcagccctatgggcaggagggcctaaagtccaagtcagtgcaactgaatggccagcccttagtgatggtggacgacgggaccctcccagaattgaagccccgcccccttcgggccggccggacattggtcatccctccagtcaccatgggcttttttgtggtcaagaatgtcaatgctttggcctgccgctaccga

SEQ ID NO: 5824 - DNA, 897 bp, Homo Sapiens
gcagcagcctcttctcttgagatgctctcgagggaattcgaaacctgtgccttctccttttcttccctgcctagaagctgcaaagaaatcaaggaacgctgccatagtgcaggtgatggcctgtattttctccgcaccaagaatggtgttgtctaccagaccttctgtgacatgacttctgggggtggcggctggaccctggtggccagcgtgcacgagaatgacatgcatgggaagtgcacggtgggtgatcgctggtccagtcagcagggcaacaaagcagactacccagagggggatggcaactgggccaactacaacacctttggatctgcagaggcggccacgagcgatgactacaagaaccctggctactacgacatccaggccaaggacctgggcatctggcatgtgcccaacaagtcccccatgcagcattggagaaacagcgccctgctgaggtaccgcaccaacactggcttcctccagagactgggacataatctgtttggcatctaccagaaatacccagtgaaatacagatcagggaaatgttggaatgacaatggcccagccatacctgtggtctatgactttggtgatgctaagaagactgcatcttattactcaccgtatggtcaacgggaatttgttgcaggattcgttcagttccgggtgtttaataacgagagagcagccaacgccctttgtgctgggataaaagttactggctgtaacactgagcatcactgcatcggtggaggagggttcttcccacagggcaaaccccgtcagtgtggggacttctccgcctttgactgggatggatatggaactcacgttaagagcagctgcagtcgggagataacggaggcggctgtactcttgttctataga

SEQ ID NO: 5825 - DNA, 264 bp, Homo Sapiens
gttaaagagggtatagagaaagcaggggtttgcccagctgacaacgtacgctgcttcaagtccgatcctccccagtgtcacacagaccaggactgtctgggggaaaggaagtgttgttacctgcactgtggcttcaagtgtgtgattcctgtgaaggaactggaagaaggaggaaacaaggatgaagatgtgtcaaggccataccctgagccaggatgggaggccaagtgtccaggctcctcctctaccaggtgtcctcagaaa

SEQ ID NO: 5826 - DNA, 1299 bp, Homo Sapiens
gaagaaacatgtccttcattcaccaggctgagctttcacagtgcagtggttggtacgggactaaatgtgaggctgatgctctacacaaggaaaaacctgacctgcgcacaaaccatcaactcctcagcttttgggaacttgaatgtgaccaagaaaaccaccttcattgtccatggattcaggccaacaggctcccctcctgtttggatggatgacttagtaaagggtttgctctctgttgaagacatgaacgtagttgttgttgattggaatcgaggagctacaactttaatatatacccatgcctctagtaagaccagaaaagtagccatggtcttgaaggaatttattgaccagatgttggcagaaggagcttctcttgatgacatttacatgatcggagtaagtctaggagcccacatatctgggtttgttggagagatgtacgatggatggctggggagaattacaggcctcgaccctgcaggccctttattcaacgggaaacctcaccaagacagattagatcccagtgatgcgcagtttgttgatgtcatccattccgacactgatgcactgggctacaaggagccattaggaaacatagacttctacccaaatggaggattggatcaacctggctgccccaaaacaatattgggaggatttcagtattttaaatgtgaccaccagaggtctgtatacctgtacctgtcttccctgagagagagctgcaccatcactgcgtatccctgtgactcctaccaggattataggaatggcaagtgtgtcagctgcggcacgtcacaaaaagagtcctgtccccttctgggctattatgctgataattggaaagaccatctaagggggaaagatcctccaatgacgaaggcattctttgacacagctgaggagagcccattctgcatgtatcattactttgtggatattataacatggaacaagaatgtaagaagaggggacattaccatcaaattgagagacaaagctggaaacaccacagaatccaaaatcaatcatgaacccaccacatttcagaaatatcaccaagtgagtctacttgcaagatttaatcaagatctggataaagtggctgcaatttccttgatgttctctacaggatctctaataggcccaaggtacaagctcaggattctccgaatgaagttaaggtcccttgcccatccggagaggcctcagctgtgtcggtatgatcttgtcctgatggaaaacgttgaaacagtcttccaacctattctttgcccagagttgcagttg

SEQ ID NO: 5827 - DNA, 483 bp, Homo Sapiens
caggagttcgatccccacaccgttatgcagaggaactacaacgtggccagggtttcaggggtctggtattctattttcatggcctcagatgacctgaatcggattaaagaaaatggagacctgagggtcttcgtccggaatattgaacacttgaagaacggcagcctaatatttgatttcgaatacatggtgcagggggagtgtgtggctgtggtcgtggtctgcgagaagacagagaagaatggggaatactccatcaactatgagggccagaacacagtggccgtctcggagactgactacaggctgttcatcaccttccacctccagaacttcaggaacgggaccgagacccacacgctggcgctctatgaaacctgcgaaaagtacggacttggctcacaaaatatcatcgacttgaccaacaaagatccctgctactccaagcattacaggagcccgcccaggcctcccatgcggtgg

SEQ ID NO: 5828 - DNA, 663 bp, Homo Sapiens
tttaccatcaattgctcaggctttgaccagcatggggttgaccctgctgtcttccaagcagtgtttgacagaaaggccttccgtccattcaccaactacagcatccctacccgtgtcaacatctccttcaccctgtctgccatcctgggagtggatgcacagctccagctgctgacatcattcctgtggatggatttggtatgggacaatcctttcattaattggaacccaaaagagtgtgttggcatcaataaactcacagtattagctgaaaacctgtggctcccagacatcttcatcgtggaatccatggatgtggatcagacgccttccggtctcactgcctatatcagcagtgaaggtcgaattaagtatgataagccaatgagggtgaccagcatctgtaacctggacatcttctacttcccttttgaccaacagaactgtaccttcaccttcagttctttcctctacacagtggacagcatgctgctgggcatggacaaggaggtgtgggagatcacagacacgtctcgcaaagtcatccaaacccagggggagtgggagctcttgggcatcaacaaggccaccccaaagatgtccatgggcaacaacctatatgaccagatcatgttttatgtggccatcaggcgcaggccaagc

SEQ ID NO: 5829 - DNA, 1347 bp, Homo Sapiens
ttccccaaacctggaggaagccaagacaaatctctacataatagagaattaagtgcagaaagacctttgaatgaacagattgctgaagcagaagaagacaagattaaaaaaacatatcctccagaaaacaagccaggtcagagcaactattcttttgttgataacttgaacctgctaaaggcaataacagaaaaggaaaaaattgagaaagaaagacaatctataagaagctccccacttgataataagttgaatgtggaagatgttgattcaaccaagaatcgaaaactgatcgatgattatgactctactaagagtggattggatcataaatttcaagatgatccagatggtcttcatcaactagacgggactcctttaaccgctgaagacattgtccataaaatcgctgccaggatttatgaagaaaatgacagagccgcgtttgacaagattgtttctaaactacttaatctcggccttatcacagaaagccaagcacatacactggaagatgaagtagcagaggttttacaaaaattaatctcaaaggaagccaacaattatgaggaggatcccaataagcccacaagctggactgagaatcaggctggaaaaataccagagaaagtgactccaatggcagcaattcaagatggtcttgctaagggagaaaacgatgaaacagtatctaacacattaaccttgacaaatggcttggaaaggagaactaaaacctacagtgaagacaactttgaggaactccaatatttcccaaatttctatgcgctactgaaaagtattgattcagaaaaagaagcaaaagagaaagaaacactgattactatcatgaaaacactgattgactttgtgaagatgatggtgaaatatggaacaatatctccagaagaaggtgtttcctaccttgaaaacttggatgaaatgattgctcttcagaccaaaaacaagctagaaaaaaatgctactgacaatataagcaagcttttcccagcaccatcagagaagagtcatgaagaaacagacagtaccaaggaagaagcagctaagatggaaaaggaatatggaagcttgaaggattccacaaaagatgataactccaacccaggaggaaagacagatgaacccaaaggaaaaacagaagcctatttggaagccatcagaaaaaatattgaatggttgaagaaacatgacaaaaagggaaataaagaagattatgacctttcaaagatgagagacttcatcaataaacaagctgatgcttatgtggagaaaggcatccttgacaaggaagaagccgaggccatcaagcgcatttatagcagcctg

SEQ ID NO: 5830 - DNA, 930 bp, Homo Sapiens
ctggagcgcagcaccaacagcttcagttactcatcataccacaccctggaggagatatatagctggattgacaactttgtaatggagcattccgatattgtctcaaaaattcagattggcaacagctttgaaaaccagtccattcttgtcctgaagttcagcactggaggttctcggcacccagccatctggatcgacactggaattcactcccgggagtggatcacccatgccaccggcatctggactgccaataagattgtcagtgattatggcaaagaccgtgtcctgacagacatactgaatgccatggacatcttcatagagctcgtcacaaaccctgatgggtttgcttttacccacagcatgaaccgcttatggcggaagaacaagtccatcagacctggaatcttctgcatcggcgtggatctcaacaggaactggaagtcgggttttggaggaaatggttctaacagcaacccctgctcagaaacttatcacgggccctcccctcagtcggagccggaggtggctgccatagtgaacttcatcacagcccatggcaacttcaaggctctgatctccatccacagctactctcagatgcttatgtacccttacggccgattgctggagcccgtttcaaatcagagggagttgtacgatcttgccaaggatgcggtggaggccttgtataaggtccatgggatcgagtacatttttggcagcatcagcaccaccctctatgtggccagtgggatcaccgtcgactgggcctatgacagtggcatcaagtacgccttcagctttgagctccgggacactgggcagtatggcttcctgctgccggccacacagatcatccccacggcccaggagacgtggatggcgcttcggaccatcatggagcacaccctgaatcacccctac

SEQ ID NO: 5831 - DNA, 2922 bp, Homo Sapiens
catgccaagccaggcagctacagcatcgaggtgctgctggtggtggacgactcggtggttcgcttccatggcaaggagcatgtgcagaactatgtcctcaccctcatgaatatcgtagatgagatttaccacgatgagtccctgggggttcatataaatattgccctcgtccgcttgatcatggttggctaccgacagtccctgagcctgatcgagcgcgggaacccctcacgcagcctggagcaggtgtgtcgctgggcacactcccagcagcgccaggaccccagccacgctgagcaccatgaccacgttgtgttcctcacccggcaggactttgggccctcaggtatgcaagggtatgcacccgtcactggcatgtgtcaccccctgaggagctgtgccctcaaccatgaggatggcttctcctcagccttcgtgatagctcatgagaccggccacgtgctcggcatggagcatgacggtcaggggaatggctgtgcagatgagaccagcctgggcagcgtcatggcgcccctggtgcaggctgccttccaccgcttccattggtcccgctgcagcaagctggagctcagccgctacctcccctcctacgactgcctcctcgatgacccctttgatcctgcctggccccagcccccagagctgcctgggatcaactactcaatggatgagcagtgccgctttgactttggcagtggctaccagacctgcttggcattcaggacctttgagccctgcaagcagctgtggtgcagccatcctgacaacccgtacttctgcaagaccaagaaggggcccccgctggatgggactgagtgtgcacccggcaagtggtgcttcaaaggtcactgcatctggaagtcgccggagcagacatatggccaggatggaggctggagctcctggaccaagtttgggtcatgttcgcggtcatgtgggggcggggtgcgatcccgcagccggagctgcaacaacccctccccagcctatggaggccgcctgtgcttagggcccatgttcgagtaccaggtctgcaacagcgaggagtgccctgggacctacgaggacttccgggcccagcagtgtgccaagcgcaactcctactatgtgcaccagaatgccaagcacagctgggtgccctacgagcctgacgatgacgcccagaagtgtgagctgatctgccagtcggcggacacgggggacgtggtgttcatgaaccaggtggttcacgatgggacacgctgcagctaccgggacccatacagcgtctgtgcgcgtggcgagtgtgtgcctgtcggctgtgacaaggaggtggggtccatgaaggcggatgacaagtgtggagtctgcgggggtgacaactcccactgcaggactgtgaaggggacgctgggcaaggcctccaagcaggcaggagctctcaagctggtgcagatcccagcaggtgccaggcacatccagattgaggcactggagaagtccccccaccgcattgtggtgaagaaccaggtcaccggcagcttcatcctcaaccccaagggcaaggaagccacaagccggaccttcaccgccatgggcctggagtgggaggatgcggtggaggatgccaaggaaagcctcaagaccagcgggcccctgcctgaagccattgccatcctggctctccccccaactgagggtggcccccgcagcagcctggcctacaagtacgtcatccatgaggacctgctgccccttatcgggagcaacaatgtgctcctggaggagatggacacctatgagtgggcgctcaagagctgggccccctgcagcaaggcctgtggaggagggatccagttcaccaaatacggctgccggcgcagacgagaccaccacatggtgcagcgacacctgtgtgaccacaagaagaggcccaagcccatccgccggcgctgcaaccagcacccgtgctctcagcctgtgtgggtgacggaggagtggggtgcctgcagccggagctgtgggaagctgggggtgcagacacgggggatacagtgcctgctgcccctctccaatggaacccacaaggtcatgccggccaaagcctgcgccggggaccggcctgaggcccgacggccctgtctccgagtgccctgcccagcccagtggaggctgggagcctggtcccagtgctctgccacctgtggagagggcatccagcagcggcaggtggtgtgcaggaccaacgccaacagcctcgggcattgcgagggggataggccagacactgtccaggtctgcagcctgcccgcctgtggaggaaatcaccagaactccacggtgagggccgatgtctgggaacttgggacgccagaggggcagtgggtgccacaatctgaacccctacatcccattaacaagatatcatcaacggagccctgcacgggagacaggtctgtcttctgccagatggaagtgctcgatcgctactgctccattcccggctaccaccggctctgctgtgtgtcctgcatcaagaaggcctcgggccccaaccctggcccagaccctggcccaacctcactgccccccttctccactcctggaagccccttaccaggaccccaggaccctgcagatgctgcagagcctcctggaaagccaacgggatcagaggaccatcagcatggccgagccacacagctcccaggagctctggatacaagctccccagggacccagcatccctttgcccctgagacaccaatccctggagcatcctggagcatctcccctaccacccccggggggctgccttggggctggactcagacacctacgccagtccctgaggacaaagggcaacctggagaagacctgagacatcccggcaccagcctccctgctgcctccccggtgaca

SEQ ID NO: 5832 - DNA, 1257 bp, Homo Sapiens
atgtctcgaaaaatttcaaaggagtcaaaaaaagtgaacatctctagttctctggaatctgaagatattagtttagaaacaacagttcctacggatgatatttcctcatcagaagagcgagagggcaaagtcagaatcaccaggcagctaattgaacgaaaagaactacttcataatattcagttactaaaaattgagctatcccagaaaactatgatgatcgacaatttgaaagtggattatcttacaaagattgaagaattggaggagaaacttaatgatgcacttcaccagaagcagctactaacattgagattagacaaccaattggcttttcaacagaaagatgccagcaaatatcaagaattaatgaaacaagaaatggaaaccattttgttgagacagaaacaactagaagagacaaatcttcagctaagagaaaaagctggagatgttcgtcgaaacctgcgtgactttgagttgacagaagagcaatatgttaaattaaaagcttttcctgaagatcagctttctattcctgaatatgtatctgttcgcttctatgagctagtgaatccattaagaaaggaaatctgtgaactacaagtgaaaaagaatatcctagcagaagaattaagtacaaacaaaaaccaactgaagcagctgacagagacatatgaggaagatcgaaaaaactactctgaagttcaaattagatgtcaacgtttggccttagaattagcagacacaaaacagttaattcagcaaggtgactaccgtcaagagaactatgataaagtcaagagtgaacgtgatgcacttgaacaggaagtaattgagcttaggagaaaacatgaaatacttgaagcctctcacatgattcaaacaaaagaacgaagtgaattatcaaaagaggtagtcaccttagagcaaactgttactttactgcaaaaggataaagaatatcttaatcgccaaaacatggagcttagtgttcgctgtgctcatgaagaggatcgccttgaaagacttcaagctcaactggaagaaagcaaaaaggctagagaagagatgtatgaaaaatatgtagcatccagagaccattataaaacagaatatgaaaataaactacatgatgaactagaacaaatcagattgaaaaccaaccaagaaattgatcaacttcgaaatgcctctagggaaatgtatgaacgagaaaacagaaatctccgagaagcaagggataatgctgtggct

SEQ ID NO: 5833 - DNA, 180 bp, Homo Sapiens
aatggaatccagggattcttctacccatggagctgtgagggtgacatatgggaccgggagagctgtgggggccaggcggccatcgatagccccaacctctgcctgcgtctccggtgctgctaccgcaatggggtctgctaccaccagcgtccagacgaaaacgtgcggaggaagcacatg

SEQ ID NO: 5834 - DNA, 1002 bp, Homo Sapiens
gcaacaatttcatgcagaaatgaagaagggaaagctgtggactggtttactttttataagttacctaaaaaacaaaacaaggaaagtggagagactgggttagagtacctgtacctagactctacaactagaagctggaggaagagtgagcaactaatgaatgacaccaagagtgttttgggaaggacattacaacagctatatgaagcatatgcctctaagagtaacaacacagcctatctaatatacaatgatggagtccctaaacctgtgaattacagcagaaagtatggacacaccaaaggtttactgctgtggaacagagttcaagggttctggctgattcattccatccctcagtttcctccaattccggaagaaggctatgattatccacccacagggagacgaaatggacaaagtggcatctgcataactttcaagtacaaccagtatgaggcaatagattctcagctcttggtctgcaaccccaacgtctatagctgctccatcccagccacctttcaccaggagctcattcacatgccccagctgtgcaccagggccagctcatcagagattcctggcaggctcctcaccacacttcagtcggcccagggacaaaaattcctccattttgcaaagtcggattcttttcttgacgacatctttgcagcctggatggctcaacggctgaagacacacttgttaacagaaacctggcagcgaaaaagacaagagcttccttcaaactgctcccttccttaccatgtctacaatataaaagcaattaaattatcacgacactcttatttcagttcttatcaagatcacgccaagtggtgtatttcccaaaagggcaccaaaaatcgctggacatgtattggagacctaaatcggagtccacaccaagccttcagaagtggaggattcatttgtacccagaattggcaaatttaccaagcatttcaaggattagtattatactatgaaagctgtaag

SEQ ID NO: 5835 - DNA, 1293 bp, Homo Sapiens
ctgcccgtggcgcccgcaggcggcaggaatcctcctccggcgataggacagttttggcatgtgactgacttacacttagaccctacttaccacatcacagatgaccacacaaaagtgtgtgcttcatctaaaggtgcaaatgcctccaaccctggcccttttggagatgttctgtgtgattctccatatcaacttattttgtcagcatttgattttattaaaaattctggacaagaagcatctttcatgatatggacaggggatagcccacctcatgttcctgtacctgaactctcaacagacactgttataaatgtgatcactaatatgacaaccaccatccagagtctctttccaaatctccaggttttccctgcgctgggtaatcatgactattggccacaggatcaactgcctgtagtcaccagtaaagtgtacaatgcagtagcaaacctctggaaaccatggctagatgaagaagctattagtactttaaggaaaggtggtttttattcacagaaagttacaactaatccaaaccttaggatcatcagtctaaacacaaacttgtactacggcccaaatataatgacactgaacaagactgacccagccaaccagtttgaatggctagaaagtacattgaacaactctcagcagaataaggagaaggtgtatatcatagcacatgttccagtggggtatctgccatcttcacagaacatcacagcaatgagagaatactataatgagaaattgatagatatttttcaaaaatacagtgatgtcattgcaggacaattttatggacacactcacagagacagcattatggttctttcagataaaaaaggaagtccagtaaattctttgtttgtggctcctgctgttacaccagtgaagagtgttttagaaaaacagaccaacaatcctggtatcagactgtttcagtatgatcctcgtgattataaattattggatatgttgcagtattacttgaatctgacagaggcgaatctaaagggagagtccatctggaagctggagtatatcctgacccagacctacgacattgaagatttgcagccggaaagtttatatggattagctaaacaatttacaatcctagacagtaagcagtttataaaatactacaattacttctttgtgagttatgacagcagtgtaacatgtgataagacatgtaaggcctttcagatttgtgcaattatgaatcttgataatatttcctatgcagattgcctcaaacagctttatataaagcacaattac

SEQ ID NO: 5836 - DNA, 609 bp, Homo Sapiens
caagtatttgaaataaaaatggatgcaagtttaggaaatctatttgcaagatcagcattggacacagctgcacgttctacaaagcctcccagatataagtgtgggatctcaaaagcttgccctgagaagcattttgcttttaaaatggcaagtggagcagccaacgtggtgggacccaaaatctgcctggaagataatgttttaatgagtggtgttaagaataatgttggaagagggatcaatgttgccttggcaaatggaaaaacaggagaagtattagacactaaatattttgacatgtggggaggagatgtggcaccatttattgagtttctgaaggccatacaagatggaacaatagttttaatgggaacatacgatgatggagcaaccaaactcaatgatgaggcacggcggctcattgctgatttggggagcacatctattactaatcttggttttagagacaactgggtcttctgtggtgggaagggcattaagacaaaaagcccttttgaacagcacataaagaacaataaggatacaaacaaatatgaaggatggcctgaagttgtagaaatggaaggatgcatcccccagaagcaagac

SEQ ID NO: 5837 - DNA, 243 bp, Homo Sapiens
tccgtgtgccccctaccaccggagccagagaatggtggctacatctgccacccccggccctgcagagaccccctgacagcaggcagtgtcatcgaatacctgtgtgctgaaggctacatgttgaagggcgattacaaatacctgacgtgtaagaatggcgagtggaaaccagccatggagattagctgccgtctcaacgaggataaagacacccacacatcacttggggtccccacgctgtct

SEQ ID NO: 5838 - DNA, 1908 bp, Homo Sapiens
aactcagtggagaggaagatatatatccccttaaataaaacagctccctgtgttcgcctgctcaacgccactcatcagattggctgccagtcttcaattagtggagacacaggggttatccacgtagtagagaaagaggaggacctacagtgggtattgactgatggccccaaccccccttacatggttctgctggagagcaagcattttaccagggatttaatggagaagctgaaagggagaaccagccgaattgctggtcttgcagtgtccttgaccaagcccagtcctgcctcaggcttctctcctagtgtacagtgcccaaatgatgggtttggtgtttactccaattcctatgggccagagtttgctcactgcagagaaatacagtggaattcgctgggcaatggtttggcttatgaagactttagtttccccatctttcttcttgaagatgaaaatgaaaccaaagtcatcaagcagtgctatcaagatcacaacctgagtcagaatggctcagcaccaaccttcccactatgtgccatgcagctcttttcacacatgcatgctgtcatcagcactgccacctgcatgcggcgcagctccatccaaagcaccttcagcatcaacccagaaatcgtctgtgaccccctgtctgattacaatgtgtggagcatgctaaagcctataaatacaactgggacattaaagcctgacgacagggttgtggttgctgccacccggctggatagtcgttcctttttctggaatgtggccccaggggctgaaagcgcagtggcttcctttgtcacccagctggctgctgctgaagctttgcaaaaggcacctgatgtgaccaccctgccccgcaatgtcatgtttgtcttctttcaaggggaaacttttgactacattggcagctcgaggatggtctacgatatggagaagggcaagtttcccgtgcagttagagaatgttgactcatttgtggagctgggacaggtggccttaagaacttcattagagctttggatgcacacagatcctgtttctcagaaaaatgagtctgtacggaaccaggtggaggatctcctggccacattggagaagagtggtgctggtgtccctgctgtcatcctcaggaggccaaatcagtcccagcctctcccaccatcttccctgcagcgatttcttcgagctcgaaacatctctggcgttgttctggctgaccactctggtgccttccataacaaatattaccagagtatttacgacactgctgagaacattaatgtgagctatcccgaatggctgagccctgaagaggacctgaactttgtaacagacactgccaaggccctggcagatgtggccacggtgctgggacgtgctctgtatgagcttgcaggaggaaccaacttcagcgacacagttcaggctgatccccaaacggttacccgcctgctctatgggttcctgattaaagccaacaactcatggttccagtctatcctcaggcaggacctaaggtcctacttgggtgacgggcctcttcaacattacatcgctgtctccagccccaccaacaccacttatgttgtacagtatgccttggcaaatttgactggcacagtggtcaacctcacccgagagcagtgccaggatccaagtaaagtcccaagtgaaaacaaggatctgtatgagtactcatgggtccagggccctttgcattctaatgagacggaccgactcccccggtgtgtgcgttctactgcacgattagccagggccttgtctcctgcctttgaactgagtcagtggagctctactgaatactctacatggactgagagccgctggaaagatatccatgcccggatatttctcatcgccagcaaagagcttgag

SEQ ID NO: 5839 - DNA, 1206 bp, Homo Sapiens
gaaggcgacgccaaggggctcaaggagggcgagacccccggcaatttcatggaggacgagcaatggctgtcgtccatctcgcagtacagcggcaagatcaagcactggaaccgcttccgagacgaagtggaggatgactatatcaagagctgggaggacaatcagcaaggagatgaagccctggataccaccaaggacccctgccagaaggtgaagtgcagccgccacaaggtgtgcattgcccagggctaccagcgggccatgtgcatcagtcgcaagaagctggagcacaggatcaagcagccgaccgtgaaactccatggaaacaaagactccatctgcaagccctgccacatggcccagcttgcctctgtctgcggctcagatggccacacttacagctctgtgtgtaagctggagcaacaggcgtgcctgagcagcaagcagctggcggtgcgatgcgagggcccctgcccctgccccacggagcaggctgccacctccaccgccgatggcaaaccagagacttgcaccggtcaggacctggctgacctgggagatcggctgcgggactggttccagctccttcatgagaactccaagcagaatggctcagccagcagtgtagccggcccggccagcgggctggacaagagcctgggggccagctgcaaggactccattggctggatgttctccaagctggacaccagtgctgacctcttcctggaccagacggagctggccgccatcaacctggacaagtacgaggtctgcatccgtcccttcttcaactcctgtgacacctacaaggatggccgggtctctactgctgagtggtgcttctgcttctggagggagaagcccccctgcctggcagagctggagcgcatccagatccaggaggccgccaagaagaagccaggcatcttcatcccgagctgcgacgaggatggctactaccggaagatgcagtgtgaccagagcagcggtgactgctggtgtgtggaccagctgggcctggagctgactggcacgcgcacgcatgggagccccgactgcgatgacatcgtgggcttctcgggggactttggaagcggtgtcggctgggaggatgaggaggagaaggagacggaggaagcaggcgaggaggccgaggaggaggagggcgaggcaggcgaggctgacgacgggggctacatctgg

SEQ ID NO: 5840 - DNA, 699 bp, Homo Sapiens
aaagtcatgaacttcacaattgatggaatgggaaacctgaggatcacagaaaaaggtctaaagctagaaggagactctgaattcttacaacctctctacgccaaagaaatccagtcccgaccaggtaatgccctgtacttcaagtctgccagaaatgttacagtgaacattctcaatgaccagactaaagtgctaactcagcttataacaggtccaaaagccgtagaagcttatggtaaaaaatttgaggtaaaaactgtttctggaaaattgctcttctctgcagacaataatgaagtggtagtaggagctgaaagattacgagttttaggagcggagggcacagtgttccctaaatctatagaaacacctaatgtcagggcagaccccttcaaagaactaaggttggagtccccaacccggtctctagtgatggaggccccaaaaggagtggaaatcaatgcagaagctggcaatatggaagccacctgcaggacagagctgagactggaatccaaagatggagagattaagttagatgctgcgaaaatcaggctacctagactgcctcatggatcctacacgcctacaggaacgaggcagaaggtcttcgagatctgcgtctgcgccaatgggagattattcctgtctcaggcaggagctgggtccacttgtcagataaacacaagtgtctgcctc

SEQ ID NO: 5841 - DNA, 879 bp, Homo Sapiens
gcagcctgtgagcccgtccgcatccccctgtgcaagtccctgccctggaacatgactaagatgcccaaccacctgcaccacagcactcaggccaacgccatcctggccatcgagcagttcgaaggtctgctgggcacccactgcagccccgatctgctcttcttcctctgtgccatgtacgcgcccatctgcaccattgacttccagcacgagcccatcaagccctgtaagtctgtgtgcgagcgggcccggcagggctgtgagcccatactcatcaagtaccgccactcgtggccggagaacctggcctgcgaggagctgccagtgtacgacaggggcgtgtgcatctctcccgaggccatcgttactgcggacggagctgattttcctatggattctagtaacggaaactgtagaggggcaagcagtgaacgctgtaaatgtaagcctattagagctacacagaagacctatttccggaacaattacaactatgtcattcgggctaaagttaaagagataaagactaagtgccatgatgtgactgcagtagtggaggtgaaggagattctaaagtcctctctggtaaacattccacgggacactgtcaacctctataccagctctggctgcctctgccctccacttaatgttaatgaggaatatatcatcatgggctatgaagatgaggaacgttccagattactcttggtggaaggctctatagctgagaagtggaaggatcgactcggtaaaaaagttaagcgctgggatatgaagcttcgtcatcttggactcagtaaaagtgattctagcaatagtgattccactcagagtcagaagtctggcaggaactcgaacccccggcaagcacgcaac

SEQ ID NO: 5842 - DNA, 885 bp, Homo Sapiens
ctgcccgccagcaatgcccttgtcttcatcaccggctgtgactcaggctttgggcgccttctggcactgcagctggaccagagaggcttccgagtcctggccagctgcctgaccccctccggggccgaggacctgcagcgggtggcctcctcccgcctccacaccaccctgttggatatcactgatccccagagcgtccagcaggcagccaagtgggtggagatgcacgttaaggaagcagggctttttggtctggtgaataatgctggtgtggctggtatcatcggacccacaccatggctgacccgggacgatttccagcgggtgctgaatgtgaacacaatgggtcccatcggggtcacccttgccctgctgcctctgctgcagcaagcccggggccgggtgatcaacatcaccagcgtcctgggtcgcctggcagccaatggtgggggctactgtgtctccaaatttggcctggaggccttctctgacagcctgaggcgggatgtagctcattttgggatacgagtctccatcgtggagcctggcttcttccgaacccctgtgaccaacctggagagtctggagaaaaccctgcaggcctgctgggcacggctgcctcctgccacacaggcccactatgggggggccttcctcaccaagtacctgaaaatgcaacagcgcatcatgaacctgatctgtgacccggacctaaccaaggtgagccgatgcctggagcatgccctgactgctcgacacccccgaacccgctacagcccaggttgggatgccaagctgctctggctgcctgcctcctacctgccagccagcctggtggatgctgtgctcacctgggtccttcccaagcctgcccaagcagtctac

SEQ ID NO: 5843 - DNA, 882 bp, Homo Sapiens
agaccccacggcgacaccgccaagaagcccatcatcggaatattaatgcaaaaatgccgtaataaagtcatgaaaaactatggaagatactatattgctgcgtcctatgtaaagtacttggagtctgcaggtgcgagagttgtaccagtaaggctggatcttacagagaaagactatgaaatacttttcaaatctattaatggaatccttttccctggaggaagtgttgacctcagacgctcagattatgctaaagtggccaaaatattttataacttgtccatacagagttttgatgatggagactattttcctgtgtggggcacatgccttggatttgaagagctttcactgctgattagtggagagtgcttattaactgccacagatactgttgacgtggcaatgccgctgaacttcactggaggtcaattgcacagcagaatgttccagaattttcctactgagttgttgctgtcattagcagtagaacctctgactgccaatttccataagtggagcctctccgtgaagaattttacaatgaatgaaaagttaaagaagtttttcaatgtcttaactacaaatacagatggcaagattgagtttatttcaacaatggaaggatataagtatccagtatatggtgtccagtggcatccagagaaagcaccttatgagtggaagaatttggatggcatttcccatgcacctaatgctgtgaaaaccgcattttatttagcagagttttttgttaatgaagctcggaaaaacaaccatcattttaaatctgaatctgaagaggagaaagcattgatttatcagttcagtccaatttatactggaaatatttcttcatttcagcaatgttacatatttgat

SEQ ID NO: 5844 - DNA, 837 bp, Homo Sapiens
gcgcttcgcatcggagccttcaacattcagagcttcggtgacagcaaagtgtcggaccccgcttgcggcagcatcatcgcgaagatcctggctggctatgacctcgcgctggtgcaggaggtgcgagacccagacctcagcgccgtgtccgcgctcatggagcagatcaacagcgtgtccgagcacgagtacagctttgtgagcagccagcccctgggccgggaccagtacaaggagatgtacctgttcgtgtacaggaaagacgcggtgtcggtcgtggacacctacctgtacccagaccccgaggacgtcttcagccgcgagcccttcgtggtcaagttctcggcccccggcaccggtgagcgggccccgcccctcccctcccgccgagctctgacgcccccaccccttcccgcagcagcacagaacctggtgctgatcccgctgcacgcggcgccgcatcaagccgtggcggagatcgacgcgctctacgacgtgtacctggacgtgatcgacaagtggggcaccgacgacatgctgttcctgggcgacttcaacgccgactgcagctatgtgcgggcgcaggactgggccgccatccgtctgaggagcagtgaggtcttcaagtggctcatccctgacagcgccgacaccacggtgggcaactcagactgcgcctacgaccgcattgtggcctgtggcgcccgcctgcgccggagcctgaagccccagtcggccaccgtgcacgacttccaggaggaattcggcctggaccagactcaggctcttgccatcagcgaccactttccagtggaggtgaccctcaagttccaccga

SEQ ID NO: 5845 - DNA, 669 bp, Homo Sapiens
ttggtgcatggcggaccctgcgacaagacatctcacccctaccaagctgccctctacacctcgggccacttgctctgtggtggggtccttatccatccactgtgggtcctcacagctgcccactgcaaaaaaccgaatcttcaggtcttcctggggaagcataaccttcggcaaagggagagttcccaggagcagagttctgttgtccgggctgtgatccaccctgactatgatgccgccagccatgaccaggacatcatgctgttgcgcctggcacgcccagccaaactctctgaactcatccagccccttcccctggagagggactgctcagccaacaccaccagctgccacatcctgggctggggcaagacagcagatggtgatttccctgacaccatccagtgtgcatacatccacctggtgtcccgtgaggagtgtgagcatgcctaccctggccagatcacccagaacatgttgtgtgctggggatgagaagtacgggaaggattcctgccagggtgattctgggggtccgctggtatgtggagaccacctccgaggccttgtgtcatggggtaacatcccctgtggatcaaaggagaagccaggagtctacaccaacgtctgcagatacacgaactggatccaaaaaaccattcaggccaag

SEQ ID NO: 5846 - DNA, 180 bp, Homo Sapiens
tacccacccagcgagcagaccatgagggtcctgccatcgtcggctgcccgctgcgtggctctctcagtcaacgcctctggcctcctggacccggctctcctccctgctaacgactccagcagggcccccagctcaggaatggacgccagccgacccgccttagctgacagcttctatgcc

SEQ ID NO: 5847 - DNA, 1695 bp, Homo Sapiens
gccgccccttcgtccgtcccccgcggccggcagctcccggggcgtctgggctgcctgctcgaggagggcctctgcggagcgtccgaggcctgtgtgaacgatggagtgtttggaaggtgccagaaggttccggcaatggacttttaccgctacgaggtgtcgcccgtggccctgcagcgcctgcgcgtggcgttgcagaagctttccggcacaggtttcacgtggcaggatgactatactcagtatgtgatggaccaggaacttgcagacctcccgaaaacctacctgaggcgtcctgaagcatccagcccagccaggccctcaaaacacagcgttggcagcgagaggaggtacagtcgggagggcggtgctgccctggccaacgccctccgacgccacctgcccttcctggaggccctgtcccaggccccagcctcagacgtgctcgccaggacccatacggcgcaggacagaccccccgctgagggtgatgaccgcttctccgagagcatcctgacctatgtggcccacacgtctgcgctgacctaccctcccgggccccggacccagctccgcgaggacctcctgccgcggaccctcggccagctccagccagatgagctcagccctaaggtggacagtggtgtggacagacaccatctgatggcggccctcagtgcctatgctgcccagaggcccccagctccccccggggagggcagcctggagccacagtaccttctgcgtgcaccctcaagaatgcccaggcctttgctggcaccagccgccccccagaagtggccttcacctctgggagattccgaagacccctctagcacaggcgatggagcacggattcataccctcctgaaggacctgcagaggcagccggctgaggtgaggggcctgagtggcctggagctggacggcatggctgagctgatggctggcctgatgcaaggcgtggaccatggagtagctcgaggcagccctgggagagcggccctgggagagtctggagaacaggcggatggccccaaggccaccctccgtggagacagctttccagatgacggagtgcaggacgacgatgatagactttaccaagaggtccatcgtctgagtgccacactcgggggcctcctgcaggaccacgggtctcgactcttacctggagccctcccctttgcaaggcccctcgacatggagaggaagaagtccgagcaccctgagtcttccctgtcttcagaagaggagactgccggagtggagaacgtcaagagccagacgtattccaaagatctgctggggcagcagccgcattcggagcccggggccgctgcgtttggggagctccaaaaccagatgcctgggccctcgaaggaggagcagagccttccagcgggtgctcaggaggccctcagcgacggcctgcaattggaggtccagccttccgaggaagaggcgcggggctacatcgtgacagacagagaggttctcggaccagcagtgaccttcaaagtgagcgccaatgtccaaaacgtgaccactgaggatgtggagaaggccacagttgacaacaaagacaaactggaggaaacctctggactgaaaattcttcaaaccggagtcgggtcgaaaagcaaactcaagttcctgcctcctcaggcggagcaagaagactccaccaagttc

SEQ ID NO: 5848 - DNA, 309 bp, Homo Sapiens
ttcttcatgggatgctccaccccaactgtggccgaagtctacccccctagcacatcaagttctatacatccgcagtctcctgcctgccgcagggactgctcgtgcccagattctatcttccacccggtctgtggagacaatggaatcgagtacctctccccttgccatgccggctgcagcaacatcaacatgagctctgcaacctccaagcaactgatctatttgaactgcagctgtgtgaccgggggatccgcttcagcaaagacaggatcgtgccctgtcccctgtgcccacttcctgctcccggcc

SEQ ID NO: 5849 - DNA, 240 bp, Homo Sapiens
atggactcgggaaccgaggagtacgagctcaacggcggcctgcctccgggcacacccggctccccggacgcctcgccggcccgctggggctggaggcacgggcccatcaacgtgaaccattacgccagcaagaagagcgcagccgagagcatgctggacatcgcgctgctgatggccaacgcgtcccagctgaaggccgtcgtggaacagggccccagcttcgccttctatgtgcccctg

SEQ ID NO: 5850 - DNA, 717 bp, Homo Sapiens
tctgaggttgcaattaaaatcgacttcgacttcgcaccaggttcttttgatgatcagtaccaaggctgtagcaaacaggttatggagaaactaactcaaggggattatttcacaaaagacatagaagcccagaagaattattttaggatgtggcaaaaagcccacttagcctggcttaaccaaggaaaagttctaccccagaacatgactaccacacacgctgtggctattttgttttacacattgaacagcaatgttcattctgactttactagagccatggcctctgttgccaggactccacagcagtatgaacgttcattccacttcaaatatttacactactacctcacctcagcaatccagctgctgaggaaagacagcatcatggagaatggcactctgtgctatgaggtgcattataggacgaaggatgtccactttaatgcctacacaggggccaccattcgatttggccaattcctttccacatccctcctgaaagaagaggcacaggagtttgggaaccagacactatttaccatattcacctgcctgggtgcacctgtacagtacttctccctcaagaaggaagtcttgatccctccctatgagctgtttaaagttataaatatgagctaccacccaagaggaaactggttgcagttgaggtcaactgggaacctgagcacatataactgtcagctgctaaaagct

SEQ ID NO: 5851 - DNA, 804 bp, Homo Sapiens
aagaagggttaccaagacgtcgacacctccctgcagagtgctgtcatcaccaaagtcaagggcgtggccttcaccaacacctcggatcttgggcagcggatctgggatgtcgccgactacgtcattccagcccagggagagaacgtcttttttgtggtcaccaacctgattgtgacccccaaccagcggcagaacgtctgtgctgagaatgaaggcattcctgatggcgcgtgctccaaggacagcgactgccacgctggggaagcggttacagctggaaacggagtgaagaccggccgctgcctgcggagagagaacttggccaggggcacctgtgagatctttgcctggtgcccgttggagacaagctccaggccggaggagccattcctgaaggaggccgaagacttcaccattttcataaagaaccacatccgtttccccaaattcaacttctccaaaagcaatgtgatggacgtcaaggacagatctttcctgaaatcatgccactttggccccaagaaccactactgccccatcttccgactgggctccgtgatccgctgggccgggagcgacttccaggatatagccctggagggtggcgtgataggaattaatattgaatggaactgtgatcttgataaagctgcctctgagtgccaccctcactattcttttagccgtctggacaataaactttcaaagtctgtctcctccgggtacaacttcagatttgccagatattaccgagacgcagccggggtggagttccgcaccctgatgaaagcctacgggatccgc

SEQ ID NO: 5852 - DNA, 381 bp, Homo Sapiens
tggcctaagcgtctcaccaaggctcactggtttgaaattcagcatatacagccaagtcctctccaatgcaacagggcaatgagtggcatcaacaattatacccagcactgtaagcatcaaaatacctttctgcatgactctttccagaatgtggctgctgtctgtgatttgctcagcattgtctgcaaaaatcgtcggcacaactgccaccagagctcaaagcctgtcaacatgactgactgcagactcacttcaggaaagtatccccagtgccgctatagtgctgctgcccagtacaaattcttcattgttgcctgtgacccccctcagaagagcgatcccccctacaagttggttcctgtacacttagatagtattctc

SEQ ID NO: 5853 - DNA, 987 bp, Homo Sapiens
tggtcggtgaacaatttcctgatgactggtccaaaggcttacctgatttactccagcagtgtggcagctggtgcccagagtggtattgaagaatgcaagtatcagtttgcctgggaccgctggaactgccctgagagagccctgcagctgtccagccatggtgggcttcgcagtgccaatcgggagacagcatttgtgcatgccatcagttctgctggagtcatgtacaccctgactagaaactgcagccttggagattttgataactgtggctgtgatgactcccgcaacgggcaactggggggacaaggctggctgtggggaggctgcagtgacaatgtgggcttcggagaggcgatttccaagcagtttgtcgatgccctggaaacaggacaggatgcacgggcagccatgaacctgcacaacaacgaggctggccgcaaggcggtgaagggcaccatgaaacgcacgtgcaagtgccacggcgtgtctggcagctgcaccacgcagacctgttggctgcagctgcccgagttccgcgaggtgggcgcgcacctgaaggagaagtaccacgcagcactcaaggtggacctgctgcagggtgctggcaacagcgcggccggccgcggcgccatcgccgacacctttcgctccatctctacccgggagctggtgcacctggaggactccccggactactgcctggagaacaaaacgctagggctgctgggcaccgaaggccgagagtgcctaaggcgcgggcgggccctgggtcgctgggaacgccgcagctgccgccggctctgcggggactgcgggctggcggtggaggagcgccgggccgagaccgtgtccagctgcaactgcaagttccactggtgctgcgcagtccgctgcgagcagtgccgccggagggtcaccaagtacttctgtagccgcgcagagcggccgcgggggggcgctgcgcacaaacccgggagaaaaccc

SEQ ID NO: 5854 - DNA, 345 bp, Homo Sapiens
aagtttgatgattttgaggatgaggaggacatagtagagtatgatgataatgacttcgctgaatttgaggatgtcatggaagactctgttactgaatctcctcaacgggtcataatcactgaagatgatgaagatgagaccactgtggagttggaagggcaggatgaaaaccaagaaggagattttgaagatgcagatacccaggagggagatactgagagtgaaccatatgatgatgaagaatttgaaggttatgaagacaaaccagatacttcttctagcaaaaataaagacccaataacgattgttgatgttcctgcacacctccagaacagctgggagagt

SEQ ID NO: 5855 - DNA, 1263 bp, Homo Sapiens
tggagcatcggggcagctccgttctccggacgcaggaactggtgctcctatgtggtgacccgcaccatctcatgccatgtgcagaatggcacctaccttcagcgagtgctgcagaactgcccctggcccatgagctgtccggggagcagctacagaactgtggtgagacccacatacaaggtgatgtacaagatagtgaccgcccgtgagtggaggtgctgccctgggcactcaggagtgagctgcgaggaagttgcagcttcctctgcctccttggagcccatgtggtcgggcagtaccatgcggcggatggcgcttcggcccacagccttctcaggttgtctcaactgcagcaaagtgtcagagctgacagagcggctgaaggtgctggaggccaagatgaccatgctgactgtcatagagcagccagtacctccaacaccagctacccctgaggaccctgccccgctctggggtccccctcctgcccagggcagccccggagatggaggcctccaggaccaagtcggtgcttgggggcttcccgggcccaccggccccaagggagatgccggcagtcggggcccaatggggatgagaggcccaccaggtccacagggccccccagggagccctggccgggctggagctgtgggcacccctggagagaggggacctcctgggccaccagggcctcctggcccccctgggcccccagcccctgttgggccaccccatgcccggatctcccagcatggagacccattgctgtccaacaccttcactgagaccaacaaccactggccccagggacccactgggcctccaggccctccagggcccatgggtccccctgggcctcctggccccacaggtgtccctgggagtcctggtcacataggacccccaggccccactggacccaaaggaatctctggccacccaggagagaagggcgagagaggactgcgtggggagcctggcccccaaggctctgctgggcagcggggggaacctggccctaagggagaccctggtgagaagagccactggggggaggggttgcaccagctacgcgaggctttgaagattttagctgagagggttttaatcttggaaacaatgattgggctctatgaaccagagctggggtctggggcgggccctgccggcacaggcacccccagcctccttcggggcaagaggggcggacatgcaaccaactaccggatcgtggcccccaggagccgggacgagagaggc

SEQ ID NO: 5856 - DNA, 1668 bp, Homo Sapiens
gtggggagggggctgggccgcgccagcccggccgggggccccctggaagatgtggtcatcgagaggtaccacatccccagggcctgtccccgggaagtgcagatgggggattttgtgcgctaccactacaacggcacttttgaagatggcaagaagtttgattcaagctatgatcgcaacaccttggtggccatcgtggtgggtgtggggcgcctcatcactggcatggaccgaggcctcatgggcatgtgtgtcaacgagcggcgacgcctcattgtgcctccccacctgggctatgggagcatcggcctggcggggctcattccaccggatgccaccctctacttcgatgtggttctgctggatgtgtggaacaaggaagacaccgtgcaggtgagcacattgctgcgcccgccccactgcccccgcatggtccaggacggcgactttgtccgctaccactacaatggcaccctgctggacggcacctccttcgacaccagctacagtaagggcggcacttatgacacctacgtcggctctggttggctgatcaagggcatggaccaggggctgctgggcatgtgtcctggagagagaaggaagattatcatccctccattcctggcctatggcgagaaaggctatgggacagtgatccccccacaggcctcgctggtctttcacgtcctcctgattgacgtgcacaacccgaaggacgctgtccagctagagacgctggagctcccccccggctgtgtccgcagagccggggccggggacttcatgcgctaccactacaatggctccttgatggacggcaccctcttcgattccagctactcccgcaaccacacctacaatacctatatcgggcagggttacatcatccccgggatggaccaggggctgcagggtgcctgcatgggggaacgccggagaattaccatccccccgcacctcgcctatggggagaatggaactggagacaagatccctggctctgccgtgctaatcttcaacgtccatgtcattgacttccacaaccctgcggatgtggtggaaatcaggacactgtcccggccatctgagacctgcaatgagaccaccaagcttggggactttgttcgataccattacaactgttctttgctggacggcacccagctgttcacctcgcatgactacggggccccccaggaggcgactctcggggccaacaaggtgatcgaaggcctggacacgggcctgcagggcatgtgtgtgggagagaggcggcagctcatcgtgcccccgcacctggcccacggggagagtggagcccggggagtcccaggcagtgctgtgctgctgtttgaggtggagctggtgtcccgggaggatgggctgcccacaggctacctgtttgtgtggcacaaggaccctcctgccaacctgtttgaagacatggacctcaacaaggatggcgaggtccctccggaggagttctccaccttcatcaaggctcaagtgagtgagggcaaaggacgcctcatgcctgggcaggaccctgagaaaaccataggagacatgttccagaaccaggaccgcaaccaggacggcaagatcacagtcgacgagctcaagctgaagtcagatgaggacgaggagcgggtccacgaggagctc

SEQ ID NO: 5857 - DNA, 171 bp, Homo Sapiens
accctggcgcccggctggcggctggtgaagggcttcctgaaccagccagtggacgtggagttgtaccagggcctgtgggacatgtgtcgcgagcagagcagccgcgagcgcgagtgcggccagacggaccagtggggctacttcgaggcccagcccgtgctggtggcgcgg

SEQ ID NO: 5858 - DNA, 768 bp, Homo Sapiens
ccacacctcaggactttcaccgaccgcttccagacctgcaaggtgcagggcgcctggccgctcatcgacaataattacctgaacgtgcaggtcaccaacacgcctgtgctgcccggctcagcggccactgccaccagcaagctcaccatcatcttcaagaacttccaggagtgtgtggaccagaaggtgtaccaggctgagatggacgagctcccggccgccttcgtggatggctctaagaacggtggggacaagcacggggccaacagcctgaagatcactgagaaggtgtcaggccagcacgtggagatccaggccaagtacatcggcaccaccatcgtggtgcgccaggtgggccgctacctgacctttgccgtccgcatgccagaggaagtggtcaatgctgtggaggactgggacagccagggtctctacctctgcctgcggggctgccccctcaaccagcagatcgacttccaggccttccacaccaatgctgagggcaccggtgcccgcaggctggcagccgccagccctgcacccacagcccccgagaccttcccatacgagacagccgtggccaagtgcaaggagaagctgccggtggaggacctgtactaccaggcctgcgtcttcgacctcctcaccacgggcgacgtgaacttcacactggccgcctactacgcgttggaggatgtcaagatgctccactccaacaaagacaaactgcacctgtatgagaggactcgggacctgccaggcagggcg

SEQ ID NO: 5859 - DNA, 327 bp, Homo Sapiens
ttctcactgcactgccccagtgtgcccatggcgggcgtcacagccagctacggcgggagcctcctgcccgaaggccacctgaacctaacggctccctgcaacgctgcctgcagctgccagccagaacactacagccctgtgtgcggctcggacggcctcatgtacttctcactgtgccacgcagggtgccctgcagccacggagacgaatgtggacggccagaaggtgtaccgagactgtagctgtatccctcagaatctttcctctggttttggccatgccactgcagggaaatgcacttcaacttgtcagagaaagcccctcctt

SEQ ID NO: 5860 - DNA, 597 bp, Homo Sapiens
tacatgagcttcagcatgaaaaccatccgtctgccacgctggctggcagcctcgcccaccaaggagatccaggttaaaaagtacaagtgtggcctcatcaagccctgcccagccaactactttgcgtttaaaatctgcagtggggccgccaacgtcgtgggccctactatgtgctttgaagaccgcatgatcatgagtcctgtgaaaaacaatgtgggcagaggcctaaacatcgccctggtgaatggaaccacgggagctgtgctgggacagaaggcatttgacatgtactctggagatgttatgcacctagtgaaattccttaaagaaattccggggggtgcactggtgctggtggcctcctacgacgatccagggaccaaaatgaacgatgaaagcaggaaactcttctctgacttggggagttcctacgcaaaacaactgggcttccgggacagctgggtcttcataggagccaaagacctcaggggtaaaagcccctttgagcagttcttaaagaacagcccagacacaaacaaatacgagggatggccagagctgctggagatggagggctgcatgcccccgaagccattt

SEQ ID NO: 5861 - DNA, 639 bp, Homo Sapiens
tctgagatccccaaggggaagcaaaaggcgcagctccggcagagggaggtggtggacctgtataatggaatgtgcttacaagggccagcaggagtgcctggtcgagacgggagccctggggccaatggcattccgggtacacctgggatcccaggtcgggatggattcaaaggagaaaagggggaatgtctgagggaaagctttgaggagtcctggacacccaactacaagcagtgttcatggagttcattgaattatggcatagatcttgggaaaattgcggagtgtacatttacaaagatgcgttcaaatagtgctctaagagttttgttcagtggctcacttcggctaaaatgcagaaatgcatgctgtcagcgttggtatttcacattcaatggagctgaatgttcaggacctcttcccattgaagctataatttatttggaccaaggaagccctgaaatgaattcaacaattaatattcatcgcacttcttctgtggaaggactttgtgaaggaattggtgctggattagtggatgttgctatctgggttggcacttgttcagattacccaaaaggagatgcttctactggatggaattcagtttctcgcatcattattgaagaactaccaaaa

SEQ ID NO: 5862 - DNA, 924 bp, Homo Sapiens
aagccatccccagacgcaggccctcatggccaggggagggtgcaccaggcggcccccctgagcgacgctccccatgatgacgcccacgggaacttccagtacgaccatgaggctttcctgggacgggaagtggccaaggaattcgaccaactcaccccagaggaaagccaggcccgtctggggcggatcgtggaccgcatggaccgcgcgggggacggcgacggctgggtgtcgctggccgagcttcgcgcgtggatcgcgcacacgcagcagcggcacatacgggactcggtgagcgcggcctgggacacgtacgacacggaccgcgacgggcgtgtgggttgggaggagctgcgcaacgccacctatggccactacgcgcccggtgaagaatttcatgacgtggaggatgcagagacctacaaaaagatgctggctcgggacgagcggcgtttccgggtggccgaccaggatggggactcgatggccactcgagaggagctgacagccttcctgcaccccgaggagttccctcacatgcgggacatcgtgattgctgaaaccctggaggacctggacagaaacaaagatggctatgtccaggtggaggagtacatcgcggatctgtactcagccgagcctggggaggaggagccggcgtgggtgcagacggagaggcagcagttccgggacttccgggatctgaacaaggatgggcacctggatgggagtgaggtgggccactgggtgctgccccctgcccaggaccagcccctggtggaagccaaccacctgctgcacgagagcgacacggacaaggatgggcggctgagcaaagcggaaatcctgggtaattggaacatgtttgtgggcagtcaggccaccaactatggcgaggacctgacccggcaccacgatgagctg

SEQ ID NO: 5863 - DNA, 468 bp, Homo Sapiens
gggaagatgtatggccctggaggaggcaagtatttcagcaccactgaagactacgaccatgaaatcacagggctgcgggtgtctgtaggtcttctcctggtgaaaagtgtccaggtgaaacttggagactcctgggacgtgaaactgggagccttaggtgggaatacccaggaagtcaccctgcagccaggcgaatacatcacaaaagtctttgtcgccttccaagctttcctccggggtatggtcatgtacaccagcaaggaccgctatttctattttgggaagcttgatggccagatctcctctgcctaccccagccaagaggggcaggtgctggtgggcatctatggccagtatcaactccttggcatcaagagcattggctttgaatggaattatccactagaggagccgaccactgagccaccagttaatctcacatactcagcaaactcacccgtgggtcgc

SEQ ID NO: 5864 - DNA, 372 bp, Homo Sapiens
cagacgttgaaagataccacgtccagttcttcagcagactcaactatcatggacattcaggtcccgacacgagccccagatgcagtctacacagaactccagcccacctctccaaccccaacctggcctgctgatgaaacaccacaaccccagacccagacccagcaactggaaggaacggatgggcctctagtgacagatccagagacacacaagagcaccaaagcagctcatcccactgatgacaccacgacgctctctgagagaccatccccaagcacagacgtccagacagacccccagaccctcaagccatctggttttcatgaggatgaccccttcttctatgatgaacacaccctccggaaacgg

SEQ ID NO: 5865 - DNA, 180 bp, Homo Sapiens
ggcgaggactgcctgtggtacctggaccggaatggctcctggcatccggggtttaactgcgagttcttcaccttctgctgcgggacctgctaccatcggtactgctgcagggacctgaccttgcttatcaccgagaggcagcagaagcactgcctggccttcagccccaagaccatagca

SEQ ID NO: 5866 - DNA, 744 bp, Homo Sapiens
gaagttgagaaatcctcagatggtcctggtgctgcccaggaacccacgtggctcacagatgtcccagctgccatggaattcattgctgccactgaggtggctgtcataggcttcttccaggatttagaaataccagcagtgcccatactccatagcatggtgcaaaaattcccaggcgtgtcatttgggatcagcactgattctgaggttctgacacactacaacatcactgggaacaccatctgcctctttcgcctggtagacaatgaacaactgaatttagaggacgaagacattgaaagcattgatgccaccaaattgagccgtttcattgagatcaacagcctccacatggtgacagagtacaaccctgtgactgtgattgggttattcaacagcgtaattcagattcatctcctcctgataatgaacaaggcctccccagagtatgaagagaacatgcacagataccagaaggcagccaagctcttccaggggaagattctctttattctggtggacagtggtatgaaagaaaatgggaaggtgatatcatttttcaaactaaaggagtctcaactgccagctttggcaatttaccagactctagatgacgagtgggatacactgcccacagcagaagtttccgtagagcatgtgcaaaacttttgtgatggattcctaagtggaaaattgttgaaagaaaatcgtgaatcagaaggaaagactccaaaggtggaactc

SEQ ID NO: 5867 - DNA, 693 bp, Homo Sapiens
gagtctcttcttgacaatcttggcaatgacctaagcaatgtcgtggataagctggaacctgttcttcacgagggacttgagacagttgacaatactcttaaaggcatccttgagaaactgaaggtcgacctaggagtgcttcagaaatccagtgcttggcaactggccaagcagaaggcccaggaagctgagaaattgctgaacaatgtcatttctaagctgcttccaactaacacggacatttttgggttgaaaatcagcaactccctcatcctggatgtcaaagctgaaccgatcgatgatggcaaaggccttaacctgagcttccctgtcaccgcgaatgtcactgtggccgggcccatcattggccagattatcaacctgaaagcctccttggacctcctgaccgcagtcacaattgaaactgatccccagacacaccagcctgttgccgtcctgggagaatgcgccagtgacccaaccagcatctcactttccttgctggacaaacacagccaaatcatcaacaagttcgtgaatagcgtgatcaacacgctgaaaagcactgtatcctccctgctgcagaaggagatatgtccactgatccgcatcttcatccactccctggatgtgaatgtcattcagcaggtcgtcgataatcctcagcacaaaacccagctgcaaaccctcatc

SEQ ID NO: 5868 - DNA, 210 bp, Homo Sapiens
aatccgacaacagctgctccagctgacacgtatccagctactggtcctgctgatgatgaagcccctgatgctgaaaccactgctgctgcaaccactgcgaccactgctgctcctaccactgcaaccaccgctgcttctaccactgctcgtaaagacattccagttttacccaaatgggttggggatctcccgaatggtagagtgtgtccc

SEQ ID NO: 5869 - DNA, 1680 bp, Homo Sapiens
cagggtctgttgttgactctcgaagagcacatagcccacttcctagggactggaggtgccgctactaccatgggtaattcctgtatctgccgagatgacagtggaacagatgacagtgttgacacccaacagcaacaggccgagaacagtgcagtacccactgctgacacaaggagccaaccacgggaccctgttcggccaccaaggaggggccgaggacctcatgagccaaggagaaagaaacaaaatgtggatgggctagtgttggacacactggcagtaatacggactcttgtagataatgatcaggaacctccctattcaatgataacattacacgaaatggcagaaacagatgaaggatggttggatgttgtccagtctttaattagagttattccactggaagatccactgggaccagctgttataacattgttactagatgaatgtccattgcccactaaagatgcactccagaaattgactgaaattctcaatttaaatggagaagtagcttgccaggactcaagccatcctgccaaacacaggaacacatctgcagtcctaggctgcttggccgagaaactagcaggtcctgcaagtataggtttacttagcccaggaatactggaatacttgctacagtgtctgaagttacagtcccaccccacagtcatgctttttgcacttatcgcactggaaaagtttgcacagacaagtgaaaataaattgactatttctgaatccagtattagtgaccggcttgtcacattggagtcctgggctaatgatcctgattatctgaaacgtcaagttggtttctgtgcccagtggagcttagacaatctctttttaaaagaaggtagacagctgacctatgagaaagtgaacttgagtagcattagggccatgctgaatagcaatgatgtcagcgagtacctgaagatctcacctcatggcttagaggctcgctgtgatgcctcctcttttgaaagtgtgcgttgcaccttttgtgtggatgccggggtatggtactatgaagtaacagtggtcacttctggcgtcatgcagattggctgggccactcgagacagcaaattcctcaatcatgaaggctacggcattggggatgatgaatactcctgtgcgtatgatggctgccggcagctgatttggtacaatgccagaagtaagcctcacatacacccatgctggaaagaaggagatacagtaggatttctgttagacttgaatgaaaagcaaatgatcttctttttaaatggcaaccagctgcctcctgaaaagcaagtcttttcatctactgtatctggattttttgctgcagctagtttcatgtcatatcaacaatgtgagttcaattttggagcaaaaccattcaaatacccaccatctatgaaatttagcacttttaatgactacgccttcctaacagctgaagaaaaaatcattttgccaaggcacaggcgtcttgctctgttgaagcaagtcagtatccgagaaaactgctgttccctttgttgtgatgaggtagcagacacacaattgaagccatgtggacacagtgacctgtgcatggattgtgccttgcagctggagacctgcccattgtgtcgtaaagaaatagtatctagaatcagacagatttctcatatttca

SEQ ID NO: 5870 - DNA, 1350 bp, Homo Sapiens
cttcctcaactcagcgatgacatccctttccgagtcaactggcccggcaccgagttctctctgcccacaactggagttttatataaagaagataattatgtcatcatgacaactgcacataaagaaaaatataaatgcatacttccccttgtgacaagtggggatgaggaagaagaaaaggattataaaggccctaatccaagagagcttttggagccactatttaaacaaagcagttgttcctacagaattgagtcttattggacttacgaagtatgtcatggaaaacacattcggcagtaccatgaagagaaagaaactggtcagaaaataaatattcacgagtactaccttgggaatatgttggccaagaaccttctatttgaaaaagaacgagaagcagaagaaaaggaaaaatcaaatgagattcccactaaaaatatcgaaggtcagatgacaccatactatcctgtgggaatgggaaatggtacaccttgtagtttgaaacagaaccggcccagatcaagtactgtgatgtacatatgtcatcctgaatctaagcatgaaattctttcagtagctgaagttacaacttgtgaatatgaagttgtcattttgacaccactcttgtgcagtcatcctaaatataggttcagagcatctcctgtgaatgacatattttgtcaatcactgccaggatctccatttaagcccctcaccctgaggcagctggagcagcaggaagaaatactaagggtgccttttaggagaaataaagaggaagatttgcaatcaactaaagaagagagatttccagcgatccacaagtcgattgctattggctctcagccagtgctcactgttgggacaacccacatatccaaattgacagatgaccaactcataaaagagtttcttagtggttcttactgctttcgtgggggtgtcggttggtggaaatatgaattctgctatggcaaacatgtacatcaataccatgaggacaaggatagtgggaaaacctctgtggttgtcgggacatggaaccaagaagagcatattgaatgggctaagaagaatactgctagagcttatcatcttcaagacgatggtacccagacagtcaggatggtgtcacatttttatggaaatggagatatttgtgatataactgacaaaccaagacaggtgactgtaaaactaaagtgcaaagaatcagattcacctcatgctgttactgtatatatgctagagcctcactcctgtcaatatattcttggggttgaatctccagtgatctgtaaaatcttagatacagcagatgaaaatggacttctttctctccccaac

SEQ ID NO: 5871 - DNA, 342 bp, Homo Sapiens
ttgatgttactgcactatacttttcaacaaccaagacatcaaagcagtgtcaagttacgtgagcaaatactagacttaagcaaaagatatgttaaagctctagcagaggaaaataagaacacagtggatgtcgagaacggtgcttctatggcaggatatgcggatctgaaaagaacaattgctgtccttctggatgacattttgcaacgattggtgaagctggagaacaaagttgactatattgttgtgaatggctcagcagccaacaccaccaatggtactagtgggaatttggtgccagtaaccacaaataaaagaacgaatgtctcgggcagtatcaga

SEQ ID NO: 5872 - DNA, 1527 bp, Homo Sapiens
ggatttctttatcctcttgtggatttttgcatcagtgggaaaacaagaggacagaagccaaactttgtgattattttggccgatgacatggggtggggtgacctgggagcaaactgggcagaaacaaaggacactgccaaccttgataagatggcttcggagggaatgaggtttgtggatttccatgcagctgcctccacctgctcaccctcccgggcttccttgctcaccggccggcttggccttcgcaatggagtcacacgcaactttgcagtcacttctgtgggaggccttccgctcaacgagaccaccttggcagaggtgctgcagcaggcgggttacgtcactgggataataggcaaatggcatcttggacaccacggctcttatcaccccaacttccgtggttttgattactactttggaatcccatatagccatgatatgggctgtactgatactccaggctacaaccaccctccttgtccagcgtgtccacagggtgatggaccatcaaggaaccttcaaagagactgttacactgacgtggccctccctctttatgaaaacctcaacattgtggagcagccggtgaacttgagcagccttgcccagaagtatgctgagaaagcaacccagttcatccagcgtgcaagcaccagcgggaggcccttcctgctctatgtggctctggcccacatgcacgtgcccttacctgtgactcagctaccagcagcgccacggggcagaagcctgtatggtgcagggctctgggagatggacagtctggtgggccagatcaaggacaaagttgaccacacagtgaaggaaaacacattcctctggtttacaggagacaatggcccgtgggctcagaagtgtgagctagcgggcagtgtgggtcccttcactggattttggcaaactcgtcaagggggaagtccagccaagcagacgacctgggaaggagggcaccgggtcccagcactggcttactggcctggcagagttccagttaatgtcaccagcactgccttgttaagcgtgctggacatttttccaactgtggtagccctggcccaggccagcttacctcaaggacggcgctttgatggtgtggacgtctccgaggtgctctttggccggtcacagcctgggcacagggtgctgttccaccccaacagcggggcagctggagagtttggagccctgcagactgtccgcctggagcgttacaaggccttctacattaccggtggagccagggcgtgtgatgggagcacggggcctgagctgcagcataagtttcctctgattttcaacctggaagacgataccgcagaagctgtgcccctagaaagaggtggtgcggagtaccaggctgtgctgcccgaggtcagaaaggttcttgcagacgtcctccaagacattgccaacgacaacatctccagcgcagattacactcaggacccttcagtaactccctgctgtaatccctaccaaattgcctgccgctgtcaagccgca

SEQ ID NO: 5873 - DNA, 309 bp, Homo Sapiens
atggacggcaacgacaacgtgaccctgctcttcgcccctctgctgcgggacaactacaccctggcgcccaatgccagcagcctgggccccggcacggacctcgccctcgcccctgcctccagcgccggccccggccctgggctcagcctcgggccgggtccgagcttcggcttcagccccggccccactccgaccccggagcccacgaccagcggcctcgcgggcggcgcggcgagccacggcccttccccgttccctcggccctgggcgccccacgcgctcccgttctgggacacgccgctgaaccac

SEQ ID NO: 5874 - DNA, 1287 bp, Homo Sapiens
gcatccaacgatccacgcaactttgtccctaacaaaatgtggaagggattagtcaagaggaatgcatctgtggaaacagttgataataaaacgtctgaggatgtaaccatggcagcagcttctcctgtcacattgaccaaagggacttcggcagcccacctcaactctatggaagtcacaacagaggacacaagcaggacagatgtgagtgaaccagcaacttcaggagttgcagctgatggtgtgacctccattgctcccacggctgtggcctccagtacgactgcggcctccattacgactgcggcctccagtatgactgtggcctccagtgctcccacgactgcagcctccagtacaactgtggcctccattgctcccacgactgcagcctccagtatgactgcggcctccagcactcccatgacacttgcactccccgcgcccacgtccacttccacagggcggaccccgtccactaccgccactgggcatccatctctcagcacagccctcgcacaagtgccaaagagcagcgcgttgccaagaacagcaaccctggccacattggccacacgtgctcagactgtagcgaccacagcaaacacaagcagccccatgagcactcgtccaagtccttccaagcacatgcccagtgacaccgcggcaagccctgtaccccctatgcgtccccaagcacaaggtcccattagccaggtgtcagtggaccagcctgtggttaacacaacaaataaatccacacccatgccctcaaacacaaccccagagcccgcccccacccccacagtggtgaccaccaccaaggcacaagccagggagccaactgccagcccagtgccagtacctcacaccagcccaatccctgagatggaggccatgtcccccacgacacagccaagccccatgccatatacccagagggccgctgggccaggcacatcccaggcaccggagcaggtagagactgaagccacaccaggtactgattccactgggccaacacccaggagctcagggggcactaagatgccagccacggactcgtgccagcccagcacccaaggccagtacatggtggtcaccactgagcccctcacccaggccgtggtagacaaaactctccttctggtggtgctgttactcggggtgacccttttcatcacagtcttggttttgtttgccctgcaggcctatgagagctacaagaagaaggactacacccaggtggactacttaatcaacgggatgtatgcggactcagaaatg

SEQ ID NO: 5875 - DNA, 990 bp, Homo Sapiens
cggggctacctgacccggcctcacctggtggcaatggaccccgctgccccagccccagtggcgggcttcccggctgtcaccctctgcaatatcaaccgcttccggcattcggcactcagcgatgccgacatcttccacctggccaatctgacagggctgccccccaaagaccgggatgggcaccgtgcggctggcctgcgctacccagagcctgacatggtagacatcctcaaccgcactggccaccagctcgccgacatgcttaagagctgcaacttcagtgggcatcactgctccgccagcaacttctctgtggtctatactcgctatgggaagtgttacaccttcaacgcggacccgcggagctcgctgcccagccgggcagggggcatgggcagtggcctggagatcatgctggacatccagcaggaggagtacctgcccatctggagggagacaaatgagacgtcgtttgaggcaggtattcgggtgcagatccacagccaggaggagccgccctacatccaccagctggggttcggggtgtccccaggcttccagacctttgtgtcctgccaggaacagcggctgacctacctgccccagccctggggcaactgccgcgcagagagtgagctcagggagcctgagcttcagggctactcggcctacagtgtgtctgcctgccggctgcgctgtgaaaaggaggccgtgcttcagcgctgccactgccggatggtgcacatgccagactccctgggtgggggccctgagggcccgtgcttctgccccaccccctgcaacctgacacgctatgggaaagagatctccatggtcaggatccccaacaggggctcagcccggtacctggcgaggaagtacaaccgcaacgagacctacatacgggagaacttcctggtcctagatgtcttctttgaggccctgacctctgaagccatggagcagcgagcagcctatggcctgtcagcc

SEQ ID NO: 5876 - DNA, 360 bp, Homo Sapiens
ctgcacacctttctgctttatctgggtccacatatagcctcagttacattagctgcttatgaatgcaattcagttaattttcccgaaccaccctatcctgatcagattatttgtccagatgaagagggcactgaaggaaccatttttttgtggagtatcatctcaaaagttaggattgaagcctgcatgtggggtatcggtacagcaatcggagagctgcctccatatttcatggccagagcagctcgcctctcaggtgctgaaccagatgatgaagagtatcaggaatttgaagagatgctggaacatgcagagtctgcacaagactttgcctcccgggccaaactggcagttcaaaaa

SEQ ID NO: 5877 - DNA, 1929 bp, Homo Sapiens
gacctggctttcatccctccttttatccgaatgtccggccctgcggtcagcgcgtccctggtcggagacaccgagggtgtgaccgtgtccctggcagtgctgcaggacgaggcgggaatattgccaattccgacgtgtggagtgctgaacaatgagacggaagactggagcgtgactgtgatccccggtgcgaaggtgttggaagtgacagtgaggtggaagagaggtctggactggtgttcctccaatgagacagattccttctcagagtccccctgtatcctccagacccttctggtttcagcatctcataattcatcctgttcagcacatctactcattcaagtggaaatttatgccaactcttctctgacccataatgcctcagagaacgtgactgtcattcctaaccaggtgtatcagccccttggcccttgtccttgtaatttaacagctggagcctgtgatgttcgctgctgctgtgaccaggaatgctcatcaaatttaacaacgctgttcagacggtcctgcttcaccggcgtgtttggaggagacgtcaatcctccttttgatcagctctgctctgctgggacgacgacacgtggtgtccccgattggtttccctttctgtgtgtgcagtccccccttgccaacacacccttccttggttacttctatcatggtgctgtttcccccaaacaggactcttcctttgaagtatatgtggatactgacgcaaaagactttgcagactttggttacaaacaaggagatcccattatgactgtaaagaaggcatattttactattccgcaggtgtccctggctgggcagtgtatgcagaacgccccagtggcatttcttcacaattttgatgttaaatgcgttactaatttggaactataccaagaacgagatggtattatcaatgcgaagataaagaatgttgccttaggaggcatagttacaccaaaagtgatctatgaggaagcaactgacctagacaaattcatcaccaatacagaaactcctttaaataacggatcaacccctagaattgtgaatgtggaagaacattatattttcaaatggaataataataccatcagtgaaataaatgttaaaatttttagggcagagattaatgcccaccagaaagggataatgacacagagatttgtagtaaaatttttaagctataatagtggtaatgaagaagaattatctggaaatccaggttaccaacttggcaagcctgtccgagctctaaatatcaacaggatgaataatgtcacgactttacatctttggcaatcggctggaaggggtctgtgtacatcagcaactttcaaacccattttatttggagaaaatgtactctctggatgcctgttagaagtcgggattaatgaaaattgtactcagctcagggagaatgctgttgaaagacttgattcattaatacaagcgactcacgttgcaatgagaggcaactccgattacgctgatcttagtgatggctggctcgaaataatacgtgtagatgcccctgatccaggtgcagacccgctggctagcagtgtgaacggcatgtgcctggatattcctgctcacctgagcatccgcatcctcatctcggatgctggcgcggtggaagggattactcagcaggagatactcggtgtagagacaaggttctcctcagtgaactggcagtaccagtgtgggcttacctgtgagcacaaggccgaccttctccctatcagtgcatccgtccagtttattaaaattcctgcacagttaccccaccccctgacaagattccagatcaattatacagagtatgactgcaacagaaatgaggtgtgttggccgcagcttctatatccatggactcagtattatcaaggggagctgcattctcagtgt

SEQ ID NO: 5878 - DNA, 1335 bp, Homo Sapiens
gaggagcagcccccggagacagcggcacagaggtgcttctgccaggttagtggttacttggatgattgtacctgtgatgttgaaaccattgatagatttaataactacaggcttttcccaagactacaaaaacttcttgaaagtgactactttaggtattacaaggtaaacctgaagaggccgtgtcctttctggaatgacatcagccagtgtggaagaagggactgtgctgtcaaaccatgtcaatctgatgaagttcctgatggaattaaatctgcgagctacaagtattctgaagaagccaataatctcattgaagaatgtgaacaagctgaacgacttggagcagtggatgaatctctgagtgaggaaacacagaaggctgttcttcagtggaccaagcatgatgattcttcagataacttctgtgaagctgatgacattcagtcccctgaagctgaatatgtagatttgcttcttaatcctgagcgctacactggttacaagggaccagatgcttggaaaatatggaatgtcatctacgaagaaaactgttttaagccacagacaattaaaagacctttaaatcctttggcttctggtcaagggacaagtgaagagaacactttttacagttggctagaaggtctctgtgtagaaaaaagagcattctacagacttatatctggcctacatgcaagcattaatgtgcatttgagtgcaagatatcttttacaagagacctggttagaaaagaaatggggacacaacattacagaatttcaacagcgatttgatggaattttgactgaaggagaaggtccaagaaggcttaagaacttgtattttctctacttaatagaactaagggctttatccaaagtgttaccattcttcgagcgcccagattttcaactctttactggaaataaaattcaggatgaggaaaacaaaatgttacttctggaaatacttcatgaaatcaagtcatttcctttgcattttgatgagaattcattttttgctggggataaaaaagaagcacacaaactaaaggaggactttcgactgcattttagaaatatttcaagaattatggattgtgttggttgttttaaatgtcgtctgtggggaaagcttcagactcagggtttgggcactgctctgaagatcttattttctgagaaattgatagcaaatatgccagaaagtggacctagttatgaattccatctaaccagacaagaaatagtatcattattcaacgcatttggaagaatttctacaagtgtgaaagaattagaaaacttcaggaacttgttacagaatattcat

SEQ ID NO: 5879 - DNA, 813 bp, Homo Sapiens
ctcttcctctttggccagcccgacttctcctacaagcgcagcaattgcaagcccatcccggtcaacctgcagctgtgccacggcatcgaataccagaacatgcggctgcccaacctgctgggccacgagaccatgaaggaggtgctggagcaggccggcgcttggatcccgctggtcatgaagcagtgccacccggacaccaagaagttcctgtgctcgctcttcgcccccgtctgcctcgatgacctagacgagaccatccagccatgccactcgctctgcgtgcaggtgaaggaccgctgcgccccggtcatgtccgccttcggcttcccctggcccgacatgcttgagtgcgaccgtttcccccaggacaacgacctttgcatccccctcgctagcagcgaccacctcctgccagccaccgaggaagctccaaaggtatgtgaagcctgcaaaaataaaaatgatgatgacaacgacataatggaaacgctttgtaaaaatgattttgcactgaaaataaaagtgaaggagataacctacatcaaccgagataccaaaatcatcctggagaccaagagcaagaccatttacaagctgaacggtgtgtccgaaagggacctgaagaaatcggtgctgtggctcaaagacagcttgcagtgcacctgtgaggagatgaacgacatcaacgcgccctatctggtcatgggacagaaacagggtggggagctggtgatcacctcggtgaagcggtggcagaaggggcagagagagttcaagcgcatctcccgcagcatccgcaagctgcagtgc

SEQ ID NO: 5880 - DNA, 477 bp, Homo Sapiens
atggaagagccaacagcagtagaaggccaggtccagcttccaagcccccaccagggctctctcaggaaggctgtggctgctgccctggcgctggatggggaatccacaatggggcacaggaaaaagaagaggaaagagtcacgcccagaatccatcatcatctaccgctcagacaatgagaaaacagatgaggagcccggagaatcagaaggtggagatcagcctaaagaggaggagggagatgatttcctagactatcctgtggatgatgatatgtggaacctgcctctggacagccgctacgtcaccttaactgggaccatcacacgagggaagaaaaagggtcagatggtggacatccatgtcacattgacagagaaagagctgcaggaactgaccaaacctaaagagtcatcaagggaaacgacgcctgaaggaagaatggcctgccagatgggagctgaccgtgggccccat

SEQ ID NO: 5881 - DNA, 885 bp, Homo Sapiens
gccatccgtattgaggctgcgtcactgagattgacactcagcactttgcgccaccttactctaaccagcataatgaaatccaaaaggaaaactgatcacatggagagaactgcaagtgtccttcgacgggagattgtgtcagcagctaaggtgtgtggagctgccagtgagtcaccgtcagtgaagagcctccgcttgcttgttgctgatcaagacttttcctttaaagctggccagtgggttgatttctttattccaggagtctctgtggttggtgggttttcaatatgctccagtcccagactgctagaacaagagagagtgatagaattggcagtgaaatatacgaaccaccctcctgccctctgggttcacaatacgtgtacacttgactgtgaagtggctgtgagagtgggtggagagttcttctttgaccctcagcctgcggatgcctctagaaacctcgtgttgattgcaggaggagtcggaattaaccctctgctttccatcctgcggcacgcagcagatctcctcagagagcaggcaaacaaaagaaatggatatgagataggaacaataaaactattctacagtgcaaaaaataccagcgaactcctgtttaagaaaaatatccttgatttagtaaatgaatttcctgagaagattgcatgcagtttgcatgttacaaaacagactacacaaatcaatgcggaactcaagccatacatcacggaaggaagaataacggagaaggagataagagatcatatttcaaaagagactttgttctatatttgtggcccacctccaatgacagactttttctccaagcaactggaaaacaaccatgtacccaaagaacacatttgctttgagaagtggtgg

SEQ ID NO: 5882 - DNA, 147 bp, Homo Sapiens
ttgtacttgctgtcgacgcgactgccccgcgggcggagactgggctccaccgaggaggctggaggcaggtcgctgtggttcccctccgacctggcagagctgcgggagctctctgaggtccttcgagagtaccggaaggagcaccag

SEQ ID NO: 5883 - DNA, 858 bp, Homo Sapiens
gcatcagccggccaagagccactgcacaatgaggagctggcaggagcaggccgggtggcccagcctgggcccctggagcctgaggagccgagagctggaggcaggcctcggcgccggagggacctgggcagccgcctacaggcccagcgtcgagcccagcgggtggcctgggcagaagcagatgagaacgaggaggaagctgtcatcctagcccaggaggaggaaggtgtcgagaagccagcggaaactcacctgtcggggaaaattggagctaagaaactgcggaagctggaggagaaacaagcgcgaaaggcccagcgtgaggcagaggaggctgaacgtgaggagcggaaacgactcgagtcccagcgcgaagctgagtggaagaaggaggaggagcggcttcgcctggaggaggagcagaaggaggaggaggagaggaaggcccgcgaggagcaggcccagcgggagcatgaggagtacctgaaactgaaggaggcctttgtggtggaggaggaaggcgtaggagagaccatgactgaggaacagtcccagagcttcctgacagagttcatcaactacatcaagcagtccaaggttgtgctcttggaagacctggcttcccaggtgggcctacgcactcaggacaccataaatcgcatccaggacctgctggctgaggggactataacaggtgtgattgacgaccggggcaagttcatctacataaccccagaggaactggccgccgtggccaacttcatccgacagcggggccgggtgtccatcgccgagcttgcccaagccagcaactccctcatcgcctggggccgggagtcccctgcccaagccccagcc

SEQ ID NO: 5884 - DNA, 927 bp, Homo Sapiens
gcctccgcatcgtactatgaacagtatcactcactaaatgaaatctattcttggatagaatttataactgagaggcatcctgatatgcttacaaaaatccacattggatcctcatttgagaagtacccactctatgttttaaaggtttctggaaaagaacaagcagccaaaaatgccatatggattgactgtggaatccatgccagagaatggatctctcctgctttctgcttgtggttcataggccatataactcaattctatgggataatagggcaatataccaatctcctgaggcttgtggatttctatgttatgccggtggttaatgtggatggttatgactactcatggaaaaagaatcgaatgtggagaaagaaccgttctttctatgcgaacaatcattgcatcggaacagacctgaataggaactttgcttccaaacactggtgtgaggaaggtgcatccagttcctcatgctcggaaacctactgtggactttatcctgagtcagaaccagaagtgaaggcagtggctagtttcttgagaagaaatatcaaccagattaaagcatacatcagcatgcattcatactcccagcatatagtgtttccatattcctatacacgaagtaaaagcaaagaccatgaggaactgtctctagtagccagtgaagcagttcgtgctattgagaaaactagtaaaaataccaggtatacacatggccatggctcagaaaccttatacctagctcctggaggtggggacgattggatctatgatttgggcatcaaatattcgtttacaattgaacttcgagatacgggcacatacggattcttgctgccggagcgttacatcaaacccacctgtagagaagcttttgccgctgtctctaaaatagcttggcatgtcattaggaatgtt

SEQ ID NO: 5885 - DNA, 867 bp, Homo Sapiens
gtggaggttgcagaggaaagtggtcgcttatggtcagaggagcagcctgctcaccctctccaggttggggctgtgtacctgggtgaggaggagctcctgcatgacccgatgggccaggacagggcagcagaagaggccaatgcggtgctggggctggacacccaaggcgatcacatggtgatgctgtctgtgattcctggggaagctgaggacaaagtgagttcagagcctagcggcgtcacctgtggtgctggaggagcggaggactcaaggtgcaacgtccgagagagccttttctctctggatggcgctggagcacacttccctgacagagaagaggagtattacacagagccagaagtggcggaatctgacgcagccccgacagaggactccaataacactgaaagtctgaaatccccaaaggtgaactgtgaggagagaaacattacaggattagaaaatttcactctgaaaattttaaatatgtcacaggaccttatggattttctgaacccaaacggtagtgactgtactctagtcctgttttacaccccgtggtgccgcttttctgccagtttggcccctcactttaactctctgccccgggcatttccagctcttcactttttggcactggatgcatctcagcacagcagcctttctaccaggtttggcaccgtagctgttcctaatattttattatttcaaggagctaaaccaatggccagatttaatcatacagatcgaacactggaaacactgaaaatcttcatttttaatcagacaggtatagaagccaagaagaatgtggtggtaactcaagccgaccaaataggccctcttcccagcactttgataaaaagt

SEQ ID NO: 5886 - DNA, 2196 bp, Homo Sapiens
cagtcactgggcaccactaagctccggctggtgggcccagagagcaagccagaggagggccgcctggaggtgctgcaccagggccagtggggcaccgtgtgtgatgacaactttgctatccaggaggccacagtggcttgccgccagctgggcttcgaagctgccttgacctgggcccacagtgccaagtacggccaaggggagggacccatctggctggacaatgtgcgctgtgtgggcacagagagctccttggaccagtgcgggtctaatggctggggagtcagtgactgcagtcactcagaagacgtaggggtgatatgccacccccggcgccatcgtggctacctttctgaaactgtctccaatgcccttgggccccagggccggcggctggaggaggtgcggctcaagcccatccttgccagtgccaagcagcatagcccagtgaccgagggagccgtggaggtgaagtatgagggccactggcggcaggtgtgtgaccagggctggaccatgaacaacagcagggtggtgtgcgggatgctgggcttccccagcgaggtgcctgtcgacagccactactacaggaaagtctgggatctgaagatgagggaccctaagtctaggctgaagagcctgacgaataagaactccttctggatccaccaggtcacctgcctggggacagagccccacatggccaactgccaggtgcaggtggctccagcccggggcaagctgcggccagcctgcccaggtggcatgcatgctgtggtcagctgtgtggcagggcctcacttccgcccaccgaagacaaagccacaacgcaaagggtcctgggcagaggagccgagggtgcgcctgcgctccggggcccaggtgggcgagggccgggtggaagtgctcatgaaccgccagtggggcacggtctgtgaccacaggtggaacctcatctctgccagtgtcgtgtgtcgtcagctgggctttggctctgctcgggaggccctctttggggcccggctgggccaagggctagggcccatccacctgagtgaggtgcgctgcaggggatatgagcggaccctcagcgactgccctgccctggaagggtcccagaatggttgccaacatgagaatgctgctgctgtcaggtgcaatgtccctaacatgggctttcagaatcaggtgcgcttggctggtgggcgtatccctgaggaggggctattggaggtgcaggtggaggtgaacggggtcccacgctgggggagcgtgtgcagtgaaaactgggggctcaccgaagccatggtggcctgccgacagctcggcctgggttttgccatccatgcctacaaggaaacctggttctggtcggggacgccaagggcccaggaggtggtgatgagtggggtgcgctgctcaggcacagagctggccctgcagcagtgccagaggcacgggccggtgcactgctcccacggtggcgggcgcttcctggctggagtctcctgcatggacagtgcaccagacctggtgatgaacgcccagctagtgcaggagacggcctacttggaggaccgcccgctcagccagctgtattgtgcccacgaggagaactgcctctccaagtctgcggatcacatggactggccctacggataccgccgcctattgcgcttctccacacagatctacaatctgggccggactgactttcgtccaaagactggacgcgatagctgggtttggcaccagtgccacaggcattaccacagcattgaggtcttcacccactacgacctcctcactctcaatggctccaaggtggctgaggggcacaaggccagcttctgtctggaggacacaaactgccccacaggactgcagcggcgctacgcatgtgccaactttggagaacagggagtgactgtaggctgctgggacacctaccggcatgacattgattgccagtgggtggatatcacagatgtgggccccgggaattatatcttccaggtgattgtgaacccccactatgaagtggcagagtcagatttctccaacaatatgctgcagtgccgctgcaagtatgatgggcaccgggtctggctgcacaactgccacacagggaattcatacccagccaatgcagaactctccctggagcaggaacagcgtctcaggaacaacctcatc

SEQ ID NO: 5887 - DNA, 486 bp, Homo Sapiens
atgactaatagtaaaggaagatctattaccgataaaacaagtggtggtccaagtagtggaggaggttttgtagattggactttacgtttaaacacaattcaatccgacaagtttttaaatttactcttgagtatggttccagtgatttaccagaaaaaccaagaagacaggcacaaaaaagcaaacggcatttggcaagatggattatcaactgcagtacagacttttagtaatagatctgagcaacacatggagtatcacagtttctcagagcagtcttttcatgccaataatgggcacgcatcatcaagctgcagccaaaagtatgatgactatgccaattataattactgtgatggaagggagacttcagaaaccactgccatgttacaagatgaagatatatctagtgatggtgatgaagatgctattgtagaagtgaccccaaaattaccaaaggaatccagtggcatcatggcattgcaa

SEQ ID NO: 5888 - DNA, 1236 bp, Homo Sapiens
ctgggcatctggaggattgtgatcaggatccaaagaggaaaatctacttcctcatcaagcacccctacagagttctgcaggaatggtggaacctgggaaaatggcagatgtatttgtacagaagagtggaaaggactgagatgtacaattgctaatttttgtgaaaatagtacctatatgggttttacttttgccagaatcccagtgggcagatatggaccatccttgcaaacatgtggcaaggatactccaaatgcgggcaatccaatggcagtccggttgtgcagtctctctctatatggagagatagaattacaaaaagtgacaataggaaattgcaatgaaaatctggaaaccctggaaaagcaggtaaaggatgtcacagcaccacttaataacatttcttctgaagtccagattttaacatctgatgccaataaattaactgctgagaacatcactagtgctacgcgagtggttggacagatattcaacacttccagaaatgcttcacctgaggcaaagaaagttgccatagtaacagtgagtcaactcctagatgccagtgaagatgcttttcaaagagttgctgctactgctaatgatgatgcccttacaacgcttattgagcaaatggagacttattccttgtctttgggtaatcaatcagtggtggaacctaacatagcaatacagtcagcaaatttctcttcagaaaatgcggtggggccttcaaatgttcgcttctctgtgcagaaaggagctagcagttctctagtttctagttcaacatttatacatacaaatgtggatggccttaacccagatgcacagactgagcttcaggtcttgcttaatatgacgaaaaattacaccaagacatgcggctttgtagtttatcaaaatgacaagcttttccaatcaaaaacttttacagctaaatcggattttagtcaaaaaattatctcaagcaaaactgatgaaaatgagcaagatcagagtgcttctgttgacatggtctttagtccaaagtacaaccaaaaagaatttcaactctattcctatgcctgtgtctattggaatttgtcagcgaaggactgggacacatatggctgtcaaaaagacaagggcactgatggattcctgcgctgccgctgcaaccatactactaattttgctgtattaatgactttcaaaaaggattatcaatatcccaaatcacttgacatattatcc

SEQ ID NO: 5889 - DNA, 759 bp, Homo Sapiens
tacacccgcccgtgctccggcgacgccaactgcatccagccctacctggcgcggcggcccaagctgcagctgagcgtgtacaccacgacgaggtcccacctgggtgctgagaacaacatcgacctggtcttgaatgtggaagactttgatgtggagtccaaatttgaaaggacagttaatgtttctgtaccaaagaaaacgagaaacaatgggacgctgtatgcctacatcttcctccatcacgctggggtcctgccgtggcacgacgggaagcaggtgcacctggtcagtcctctgaccacctacatggtccccaagccagaagaaatcaacctgctcaccggggagtctgatacacagcagatcgaggcggagaagaagccgacgagtgccctggatgagccagtgtcccactggcgaccgcggctggcgctgaacgtgatggcggacaactttgtctttgacgggtcctccctgcctgccgatgtgcatcggtacatgaagatgatccagctggggaaaaccgtgcattacctgcccatcctgttcatcgaccagctcagcaaccgcgtgaaggacctgatggtcataaaccgctccaccaccgagctgcccctcaccgtgtcctacgacaaggtctcactggggcggctgcgcttctggatccacatgcaggacgccgtgtactccctgcagcagttcgggttttcagagaaagatgctgatgaggtgaaaggaatttttgtagataccaactta

SEQ ID NO: 5890 - DNA, 1443 bp, Homo Sapiens
tcaccctccccgcccccggcgctgttagagaaagtcttccagtacattgacctccatcaggatgaatttgtgcagacgctgaaggagtgggtggccatcgagagcgactctgtccagcctgtgcctcgcttcagacaagagctcttcagaatgatggccgtggctgcggacacgctgcagcgcctgggggcccgtgtggcctcggtggacatgggtcctcagcagctgcccgatggtcagagtcttccaatacctcccgtcatcctggccgaactggggagcgatcccacgaaaggcaccgtgtgcttctacggccacttggacgtgcagcctgctgaccggggcgatgggtggctcacggacccctatgtgctgacggaggtagacgggaaactttatggacgaggagcgaccgacaacaaaggccctgtcttggcttggatcaatgctgtgagcgccttcagagccctggagcaagatcttcctgtgaatatcaaattcatcattgaggggatggaagaggctggctctgttgccctggaggaacttgtggaaaaagaaaaggaccgattcttctctggtgtggactacattgtaatttcagataacctgtggatcagccaaaggaagccagcaatcacttacggaacccgggggaacagctacttcatggtggaggtgaaatgcagagaccaggattttcactcaggaacctttggtggcatccttcatgaaccaatggctgatctggttgctcttctcggtagcctggtagactcgtctggtcatatcctggtccctggaatctatgatgaagtggttcctcttacagaagaggaaataaatacatacaaagccatccatctagacctagaagaataccggaatagcagccgggttgagaaatttctgttcgatactaaggaggagattctaatgcacctctggaggtacccatctctttctattcatgggatcgagggcgcgtttgatgagcctggaactaaaacagtcatacctggccgagttataggaaaattttcaatccgtctagtccctcacatgaatgtgtctgcggtggaaaaacaggtgacacgacatcttgaagatgtgttctccaaaagaaatagttccaacaagatggttgtttccatgactctaggactacacccgtggattgcaaatattgatgacacccagtatctcgcagcaaaaagagcgatcagaacagtgtttggaacagaaccagatatgatccgggatggatccaccattccaattgccaaaatgttccaggagatcgtccacaagagcgtggtgctaattccgctgggagctgttgatgatggagaacattcgcagaatgagaaaatcaacaggtggaactacatagagggaaccaaattatttgctgcctttttcttagagatggcccagctccat

SEQ ID NO: 5891 - DNA, 381 bp, Homo Sapiens
tacatcttggggcgttgcacagtggctaagaaactccacgatggaggcctggattattttgagggctatagccttgagaactgggtgtgcctggcctacttcgagagcaagttcaaccccatggccatctacgagaacacacgtgagggctacactggctttggcctctttcagatgcgtggcagtgactggtgtggcgaccatggcaggaaccgctgccatatgtcatgttccgctttactgaatcctaatttagagaagacaattaaatgtgccaagaccattgtaaaaggaaaagaagggatgggagcatggcccacctggtcccggtactgccagtactccgataccctggcacggtggctggatggttgcaagctg

SEQ ID NO: 5892 - DNA, 309 bp, Homo Sapiens
atgcgctgggcggccgccaccctccgtggcaaggcgaggccccgggggcgggccggggtcaccacgcctgccccagggaaccgcacaggcacgtgcgctaagctgcggctacccccgcaagcaaccttccaagtccttcgtggcaatggtgcttccgtggggaccgtgctcatgttccgctgcccctccaaccaccagatggtggggtctgggctcctcacctgcacctggaaggggagcatcgctgagtggtcttcagggtccccagtgtgcaaactggtgccaccacacgagacctttggcttcaag

SEQ ID NO: 5893 - DNA, 1095 bp, Homo Sapiens
accgtctatttccaagaggaatttctagacggagagcattggagaaaccgatggttgcagtccaccaatgactcccgatttgggcattttagactttcgtcgggcaagttttatggtcataaagagaaagataaaggtctgcaaaccactcagaatggccgattctatgccatctctgcacgcttcaaaccgttcagcaataaagggaaaactctggttattcagtacacagtaaaacatgagcagaagatggactgtggagggggctacattaaggtctttcctgcagacattgaccagaagaacctgaatggaaaatcgcaatactatattatgtttggacccgatatttgtggatttgatatcaagaaagttcatgttattttacatttcaagaataagtatcacgaaaacaagaaactgatcaggtgtaaggttgatggcttcacacacctgtacactctaattttaagaccagatctttcttatgatgtgaaaattgatggtcagtcaattgaatccggcagcatagagtacgactggaacttaacatcactcaagaaggaaacgtccccggcagaatcgaaggattgggaacagactaaagacaacaaagcccaggactgggagaagcattttctggacgccagcaccagcaagcagagcgactggaacggtgacctggatggggactggccagcgccgatgctccagaagcccccgtaccaggatggcctgaaaccagaaggtattcataaagacgtctggctccaccgtaagatgaagaataccgactatttgacgcagtatgacctctcagaatttgagaacattggtgccattggcctggagctttggcaggtgagatctggaaccatttttgataactttctgatcacagatgatgaagagtatgcagataattttggcaaggccacctggggcgaaaccaagggtccagaaagggagatggatgccatacaggccaaggaggaaatgaagaaggcccgcgaggaagaggaggaagagctgctgtcgggaaaaattaacaggcacgaacattacttcaatcaatttcacagaaggaatgaactt

SEQ ID NO: 5894 - DNA, 810 bp, Homo Sapiens
gttcccaccatcctgcccctgggcctggctccagacacctttgacgatacctatgtgggttgtgtagaggagatggaggagaaggcagcccccctgctaaaggaggaaatggcccaccatgccctgctgcgggaatcctgggaggcagcccaggagacctgggaggacaagcgtcgagggcttaccttgccccctggcttcaaagcccagaatggaatagccattatggtctacaccaactcatcgaacaccttgtactgggagttgaatcaggccgtgcggacgggcggaggctcccgggagctctacatgaggcactttcccttcaaggccctgcatttctacctgatccgggccctgcagctgctgcgaggcagtgggggctgcagcaggggacctggggaggtggtgttccgaggtgtgggcagccttcgctttgaacccaagaggctgggggactctgtccgcttgggccagtttgcctccagctccctggataaggcagtggcccacagatttggtaatgccaccctcttctctctaacaacttgctttggggcccctatacaggccttctctgtctttcccaaggagcgcgaggtgctgattcccccccatgaagtctttttggttaccagattctctcaggatggagcccagagcttggtgactctctggagctataatcagacctgtagccattttaactgcgcctatctgggtggggagaagaggcggggctgtgtgtctgcgccaggagccctgggaacgggtgaccttcatatgacgaagaggcacctccagcagcct

SEQ ID NO: 5895 - DNA, 972 bp, Homo Sapiens
tgggatactcccaccatcgtctcccgcaaggagtggggggcaagaccgctcgcctgcagggccctgctgaccctgcctgtggcctacatcatcacagaccagctcccagggatgcagtgccagcagcagagcgtttgcagccagatgctgcgggggttgcagtcccattccgtctacaccataggctggtgcgacgtggcgtacaacttcctggttggggatgatggcagggtgtatgaaggtgttggctggaacatccaaggcttgcacacccagggctacaacaacatttccctgggcatcgccttctttggcaataagataggcagcagtcccagccctgctgccttatcagctgcagagggtctgatctcctatgccatccagaagggtcacctgtcgcccaggtatattcagccacttcttctgaaagaagagacctgcctggaccctcaacatccagtgatgcccaggaaggtttgccccaacatcatcaaacgatctgcttgggaagccagagagacacactgccctaaaatgaacctcccagccaaatatgtcatcatcatccacaccgctggcacaagctgcactgtatccacagactgccagactgtcgtccgaaacatacagtcctttcacatggacacacggaacttttgtgacattggatatcacttcctggtgggccaggatggtggcgtgtatgaaggggttggatggcacatccaaggctctcacacttatggattcaacgatattgccctaggaattgccttcatcggctactttgtagaaaagcctccaaatgctgcagcgctggaggcggcccaggacctgatccagtgtgccgtggttgaggggtacctgactccaaactacctgctgatgggccacagtgacgtggtcaacatcctgtcccctgggcaggctttgtataacatcatcagtacctggcctcatttcaagcac

SEQ ID NO: 5896 - DNA, 315 bp, Homo Sapiens
agccagcacctccggggacatgcaggtcaccaccaaatcaagcaagggacctgtgaggtggtcgccgtgcacaggtgctgcaataagaaccgcatagaagagcggtcacaaacggtcaagtgctcttgcttcccgggacaggtggcgggcacaactcgggctcaaccttcttgtgttgaagcttccattgtgattcagaaatggtggtgtcacatgaatccgtgtttggaaggagaggattgtaaagtgctgccagattactcaggttggtcctgtagcagtggcaataaagtcaaaactacgaaggtaacgcgg

SEQ ID NO: 5897 - DNA, 1443 bp, Homo Sapiens
atgtcgactctttgcccaccgccatctccagctgttgccaagacagagattgctttaagtggcaaatcacctttattagcagctacttttgcttactgggacaatattcttggtcctagagtaaggcacatttgggctccaaagacagaacaggtacttctcagtgatggagaaataacttttcttgccaaccacactctaaatggagaaatccttcgaaatgcagagagtggtgctatagatgtaaagttttttgtcttgtctgaaaagggagtgattattgtttcattaatctttgatggaaactggaatggggatcgcagcacatatggactatcaattatacttccacagacagaacttagtttctacctcccacttcatagagtgtgtgttgatagattaacacatataatccggaaaggaagaatatggatgcataaggaaagacaagaaaatgtccagaagattatcttagaaggcacagagagaatggaagatcagggtcagagtattattccaatgcttactggagaagtgattcctgtaatggaactgctttcatctatgaaatcacacagtgttcctgaagaaatagatatagctgatacagtactcaatgatgatgatattggtgacagctgtcatgaaggctttcttctcaatgccatcagctcacacttgcaaacctgtggctgttccgttgtagtaggtagcagtgcagagaaagtaaataagatagtcagaacattatgcctttttctgactccagcagagagaaaatgctccaggttatgtgaagcagaatcatcatttaaatatgagtcagggctctttgtacaaggcctgctaaaggattcaactggaagctttgtgctgcctttccggcaagtcatgtatgctccatatcccaccacacacatagatgtggatgtcaatactgtgaagcagatgccaccctgtcatgaacatatttataatcagcgtagatacatgagatccgagctgacagccttctggagagccacttcagaagaagacatggctcaggatacgatcatctacactgacgaaagctttactcctgatttgaatatttttcaagatgtcttacacagagacactctagtgaaagccttcctggatcaggtctttcagctgaaacctggcttatctctcagaagtactttccttgcacagtttctacttgtccttcacagaaaagccttgacactaataaaatatatagaagacgatacgcagaagggaaaaaagccctttaaatctcttcggaacctgaagatagaccttgatttaacagcagagggcgatcttaacataataatggctctggctgagaaaattaaaccaggcctacactcttttatctttggaagacctttctacactagtgtgcaagaacgagatgttctaatgactttt

SEQ ID NO: 5898 - DNA, 1524 bp, Homo Sapiens
cagctgcggcctcgggagcgcccgcgggggtgcccgtgcaccggccgcgcctcctccctggcgcgggactcggccgcagctgcctcggaccccggcacgatcgtgcacaacttttcccgaaccgagccccggactgaaccggctggcggcagccacagcgggtcgagctccaagttgcaggccctcttcgcccacccgctgtacaacgtcccggaggagccgcctctcctgggagccgaggactcgctcctggccagccaggaggcgctgcggtattaccggaggaaggtggcccgctggaacaggcgacacaagatgtacagagagcagatgaaccttacctccctggaccccccactgcagctccgactcgaggccagctgggtccagttccacctgggtattaaccgccatgggctctactcccggtccagccctgttgtcagcaaacttctgcaagacatgaggcactttcccaccatcagtgctgattacagtcaagatgagaaagccttgctgggggcatgtgactgcacccagattgtgaaacccagtggggtccacctcaagctggtgctgaggttctcggatttcgggaaggccatgttcaaacccatgagacagcagcgagatgaggagacaccagtggacttcttctacttcattgactttcagagacacaatgctgagatcgcagctttccatctggacaggattctggacttccgacgggtgccgccaacagtggggaggatagtaaatgtcaccaaggaaatcctagaggtcaccaagaatgaaatcctgcagagtgttttctttgtctctccagcgagcaacgtgtgcttcttcgccaagtgtccatacatgtgcaagacggagtatgctgtctgtggcaacccacacctgctggagggttccctctctgccttcctgccgtccctcaacctggcccccaggctgtctgtgcccaacccctggatccgctcctacacactggcaggaaaagaggagtgggaggtcaatcccctttactgtgacacagtgaaacagatctacccgtacaacaacagccagcggctcctcaatgtcatcgacatggccatcttcgacttcttgatagggaatatggaccggcaccattatgagatgttcaccaagttcggggatgatgggttccttattcaccttgacaacgccagagggttcggacgacactcccatgatgaaatctccatcctctcgcctctctcccagtgctgcatgataaaaaagaaaacacttttgcacctgcagctgctggcccaagctgactacagactcagcgatgtgatgcgagaatcactgctggaagaccagctcagccctgtcctcactgaaccccacctccttgccctggatcgaaggctccaaaccatcctaaggacagtggaggggtgcatagtggcccatggacagcagagtgtcatagtcgacggcccagtggaacagtcggccccagactctggccaggctaacttgacaagc

SEQ ID NO: 5899 - DNA, 672 bp, Homo Sapiens
tctctgtctccaagccagccgctgtcattccagtgccttaaagctccagccacactcacctgggaggatgagaagcagcagagatggggacagccacatggtcctgtctcctctcctctccttggtgatcacaggtgtctggtgcccttcagggacttgaatccaagctcggaagtcaacaccgcaaacctactcgaatctccttcaagtctcttgctcacttcctgttacatctgtagctacttctctttttacatattaggagaaaagaggtgtcattctttgaaaagactaaggtacagtgtatgttgcaaggtgtgcccaaacttttgtgcatgtggaaaagaaaatgtgtccgggactggtcaggtttgcacgggagtgcacgtaggagccaaggagcaggaggagccaggaggaacccaagcattgaggagctgcgggatctactgcctggaggagaggacggacaaggccagccatgaggagtgcagggagaggagcactttgggaagaccacagtgcacaggactcacacccagccttgctggagaaagcccatgccccaggcttcttccaggcagccccactgtaagacatctcattgcctcttcctgccctgggctgtctgacccactgccccttcccccaggaacacttccactgggatca

SEQ ID NO: 5900 - DNA, 393 bp, Homo Sapiens
gtcccagcacccaaggtccctatcaagatgcaagtcaaacactggccctcagagcaggacccagagaaggcctggggcgcccgtgtggtggagcctccggagaaggacgaccagctggtggtgctgttccctgtccagaagccgaaactcttgaccaccgaggagaagccacgaggtcagggcaggggccccatccttccaggcaccaaggcctggatggagaccgaggacaccctgggccgtgtcctgagtcccgagcccgaccatgacagcctgtaccaccctccgcctgaggaggaccagggcgaggagaggccccggttgtgggtgatgccaaatcaccaggtgctcctgggaccggaggaagaccaagaccacatctaccacccccag

SEQ ID NO: 5901 - DNA, 2805 bp, Homo Sapiens
gaagatggggaagtaagatcaagttgtcgtactgctccgacagatttagttttcatcttagatggctcttatagtgttggcccagaaaactttgaaatagtgaaaaagtggcttgtcaatatcacaaaaaactttgacatagggccgaagtttattcaagttggagtggttcaatatagtgactaccctgtgctggagattcctctcggaagctatgattcaggagaacatttgacggcagcagtggaatccatactctacttaggaggaaacacaaagacagggaaggccatccagtttgcgctcgattacctttttgccaagtcctcacgatttctgactaagatagcagtggtacttacggatggcaagtcccaagatgacgtcaaggatgcagctcaagcagcaagagatagtaagataacattatttgctattggtgttggttcagaaacagaagatgccgaacttagagctattgccaacaagccttcgtctacttatgtgttttatgtggaagactatattgcaatatccaaaataagggaagtgatgaagcagaaactttgtgaagaatctgtctgtccaacacgaattccagtggcagctcgtgatgaaaggggatttgatattcttttaggtttagatgtaaataaaaaggttaagaaaagaatacagctttcaccaaaaaagataaaaggatatgaagtaacatcaaaagttgatttatcagaactcacaagcaatgttttcccagaaggtcttcctccatcatatgtatttgtgtctactcaaagatttaaagtcaagaaaatttgggatttatggagaatattaactattgatggaaggccacaaatagcagttaccttaaatggtgtggacaaaatcttattatttacaacaaccagcgtaattaatggctcacaagtggttacctttgctaaccctcaagttaagacgttgtttgatgaaggctggcaccaaattcgtctcttagtaacagaacaagatgtgactttgtatattgatgaccaacaaattgaaaacaagcccttacatccagttttagggatcttgatcaatgggcaaacccaaattggaaaatattctggaaaagaagaaactgttcagtttgatgtccaaaagttgcgaatctactgtgacccagaacagaacaaccgggagacagcatgtgagattcctggatttaatggagagtgccttaatggtcccagtgatgtaggttcaactccagctccctgtatttgtcctccgggaaaaccaggacttcaaggccccaaaggtgaccctggactgcctgggaaccctggctaccctggacaacctggtcaagatggtaagcctggatatcagggaattgcagggacaccaggtgttccaggatctccaggaatacaaggagctcgaggactaccaggttacaaaggagaaccagggcgagatggtgacaagggtgatcgtggacttcctggttttcctgggcttcatggcatgccaggatcaaagggtgaaatgggtgccaaaggagacaaaggatcacctggattttatggcaaaaagggtgcaaaaggtgaaaaggggaatgctggcttccctggcctccctggacctgctggagaaccaggaagacatggaaaggatggattaatgggtagtcccggtttcaagggagaagcaggatcccctggtgctccggggcaggatggaacacggggagagcctggaatcccaggatttcctggaaaccgaggattaatgggccaaaagggagaaattgggcctccaggacagcaaggaaaaaaaggagccccagggatgcctggtttaatgggaagcaatggctcaccaggccagcctggaacaccgggatctaagggaagcaaaggtgaacctggaattcaagggatgcctggggcttctgggctcaagggagaaccaggagcaacgggttccccaggagaaccaggatacatgggtttacccgggattcaaggaaaaaagggggacaaaggaaatcaaggtgaaaaaggtattcagggtcaaaagggagaaaatggaagacagggaattccagggcaacagggaattcaaggccatcatggtgcaaaaggagagagaggtgaaaagggagaacctggtgtccgaggtgccattggatcaaaaggagaatctggggtggatggcttgatggggcccgcaggtcctaaggggcaacctggggatccaggtcctcagggacccccaggtttggatgggaagcccggaagagagttttcagaacaatttattcgacaagtttgcacagatgtaataagagcccagctaccagtcttacttcagagtggaagaattagaaattgtgatcattgcctgtcccaacatggctccccgggtattcctgggccacctggtccgataggcccagagggtcccagaggattacctggtttgccaggaagagatggtgttcctggattagtgggtgtccctggacgtccaggtgtcagaggattaaaaggcctaccaggaagaaatggggaaaaagggagccaagggtttgggtatcctggagaacaaggtcctcctggtcccccaggtccagagggccctcctggaataagcaaagaaggtcctccaggagacccaggtctccctggcaaagatggagaccatggaaaacctggaatccaagggcaaccaggccccccaggcatctgcgacccatcactatgttttagtgtaattgccagaagagatccgttcagaaaaggaccaaactat

SEQ ID NO: 5902 - DNA, 1302 bp, Homo Sapiens
cagattagtcctaaagaagggtggcaggtgtacagctcagctcaggatcctgatgggcggtgcatttgtacagttgttgctccagaacaaaacctgtgttcccgggatgccaaaagcaggcaacttcgcaaactactggaaaaggttcagaacatgtcccagtctattgaagtcttaaacttgagaactcagagagatttccaatatgttttaaaaatggaaacccaaatgaaagggctgaaggcaaaatttcggcagattgaagatgatcgaaagacacttatgaccaagcattttcaggagttgaaagagaaaatggacgagctcctgcctttgatccccgtgctggaacagtacaaaacagatgctaagttaatcacccagttcaaggaggaaataaggaatctgtctgctgtcctcactggtattcaggaggaaattggtgcctatgactacgaggaactacaccaaagagtgctgagcttggaaacaagacttcgtgactgcatgaaaaagctaacatgtggcaaactgatgaaaatcacaggcccagttacagtcaagacatctggaacccgatttggtgcttggatgacagaccctttagcatctgagaaaaacaacagagtctggtacatggacagttatactaacaataaaattgttcgtgaatacaaatcaattgcagactttgtcagtggggctgaatcaaggacatacaaccttcctttcaagtgggcaggaactaaccatgttgtctacaatggctcactctattttaacaagtatcagagtaatatcatcatcaaatacagctttgatatggggagagtgcttgcccaacgaagcctggagtatgctggttttcataatgtttacccctacacatggggtggattctctgacatcgacctaatggctgatgaaatcgggctgtgggctgtgtatgcaactaaccagaatgcaggcaatattgtcatcagccaacttaaccaagataccttggaggtgatgaagagctggagcactggctaccccaagagaagtgcaggggaatctttcatgatctgtgggacactgtatgtcaccaactcccacttaactggagccaaggtgtattattcctattccaccaaaacctccacatatgagtacacagacattcccttccataaccaatactttcacatatccatgcttgactacaatgcaagagatcgagctctctgtgcctggaacaatggccaccaggtgctgttcaatgtcacccttttccatatcatcaagacagaggatgacaca

SEQ ID NO: 5903 - DNA, 1758 bp, Homo Sapiens
ctggagagtacaaaactgctggcagaccttaaaaaatgtggtgacttggaatgtgaagctttaataaacagagtctcagccatgagagattatagaggacctgactgccgatacctgaacttcactaagggagaagagatatctgtttatgttaaacttgcaggagaaagggaagatttgtgggcaggaagtaaaggaaaggagtttggatattttcccagagatgcagtccagattgaagaggtgttcatatctgaggaaattcagatgtcaacgaaagaatctgactttctttgtcttcttggagtaagttacacatttgacaatgaagatagtgaattaaacggtgattatggtgaaaatatatatccttatgaagaagataaagatgaaaaatctagtatatatgaaagtgattttcagatagaacctggattttatgcaacttatgaaagtactttgtttgaagaccaagttccagcattagaggctcctgaagatatcggaagtaccagtgaatcaaaagactgggaagaagtagttgttgaaagtatggaacaggatcgtattccagaagtgcatgtcccaccatcttcagctgtgtctggagtcaaagaatggtttggattgggaggagaacaagctgaagagaaggcttttgaatcagttattgaacctgtacaagaaagctcatttcggagtagaaaaatagcagtggaagatgagaatgacctagaggaattaaataatggtgagcctcaaacagaacatcagcaagaatctgaatcagaaattgattcagtgccaaagacacagtctgaactagcatctgagtcagagcacattcccaaacctcaatccactggttggtttggtggaggatttacaagttatttaggttttggagatgaggatacagggcttgaattaatagctgaagaaagcaatccaccactacaagattttcccaattccatatcatctgataaagaagccacagttccatgtacagaaatattaacagaaaaaaaagacacaatcactaatgatagcttgagtctcaagccaagttggtttgattttggttttgctatactaggctttgcatatgccaaggaagataaaattatgttagatgacaggaaaaatgaagaagatggtggggcagatgaacatgaacatcctctaacaagtgaattagaccctgaaaaagaacaagaaatagaaacgataaaaattatagaaacagaagatcaaatagacaagaaaccagtctcagaaaaaacagacgaatctgatactataccatatttgaaaaagttcttgtataattttgacaacccttggaacttccagaacattccaaaggaaacagaattgccatttcccaaacagatactggatcaaaataatgtaattgaaaatgaagaaactggagaattttccattgataattatcccacagataatacaaaagttatgatattcaaaagttcatacagtctgtcagatatggtctctaacatagagttacctacgagaattcacgaagaagtatattttgaaccctcatcttctaaagatagtgatgaaaattcgaaaccatcagtagacaccgaagggcctgctctggtggagatagacagatctgtggaaaataccctgctaaatagtcagatggtttcaactgataactctttgtcttctcaaaattatatttctcagaaagaagatgcttctgagtttcagattctgaaa

SEQ ID NO: 5904 - DNA, 1386 bp, Homo Sapiens
cagcaaggtgatggatgtggacacactgtactaggccctgagagtggaacccttacatccataaactacccacagacctatcccaacagcactgtttgtgaatgggagatccgtgtaaagatgggagagagagttcgcatcaaatttggtgactttgacattgaagattctgattcttgtcactttaattacttgagaatttataatggaattggagtcagcagaactgaaataggcaaatactgtggtctggggttgcaaatgaaccattcaattgaatcaaaaggcaatgaaatcacattgctgttcatgagtggaatccatgtttctggacgcggatttttggcctcatactctgttatagataaacaagatctaattacttgtttggacactgcatccaattttttggaacctgagttcagtaagtactgcccagctggttgtctgcttccttttgctgagatatctggaacaattcctcatggatatagagattcctcgccattgtgcatggctggtgtgcatgcaggagtagtgtcaaacacgttgggcggccaaatcagtgttgtaattagtaaaggtatcccctattatgaaagttctttggctaacaacgtcacatctgtggtgggacacttatctacaagtctttttacatttaagacaagtggatgttatggaacactggggatggagtctggtgtgatcgcggatcctcaaataacagcatcatctgtgctggagtggactgaccacacagggcaagagaacagttggaaacccaaaaaagccaggctgaaaaaacctggaccgccttgggctgcttttgccactgatgaataccagtggttacaaatagatttgaataaggaaaagaaaataacaggcattataaccactggatccaccatggtggagcacaattactatgtgtctgcctacagaatcctgtacagtgatgatgggcagaaatggactgtgtacagagagcctggtgtggagcaagataagatatttcaaggaaacaaagattatcaccaggatgtgcgtaataactttttgccaccaattattgcacgttttattagagtgaatcctacccaatggcagcagaaaattgccatgaaaatggagctgctcggatgtcagtttattcctaaaggtcgtcctccaaaacttactcaacctccacctcctcggaacagcaatgacctcaaaaacactacagcccctccaaaaatagccaaaggtcgtgccccaaaatttacgcaaccactacaacctcgcagtagcaatgaatttcctgcacagacagaacaaacaactgccagtcctgatatcagaaatactaccgtaactccaaatgtaaccaaagatgtagcg

SEQ ID NO: 5905 - DNA, 483 bp, Homo Sapiens
tacaggcaccagaaaagaaagcatacttgccccagctgccagcactcctggatcgaaggtgtccaagacaacatgaagctccataaggtggactttatctggatcaacagagaccagcggtctttcgagtggtttgtgagcctgctgactaaactggagatggaccaggccgaggaggctcaatacggccgcttcctggagctgcatatgtacatgacatctgcactgggcaagaatgacatgaaggccattggcctgcagatggcccttgacctcctggccaacaaggagaagaaagactccatcacggggctgcagacgcgcacccagcctgggcggcctgactggagcaaggtgttccagaaagtggctgctgagaagaagggcaaggtgcaggtcttcttctgtggctccccagctctggccaaggtgctgaagggccattgtgagaagttcggcttcagatttttccaagagaatttc

SEQ ID NO: 5906 - DNA, 216 bp, Homo Sapiens
ttcctcatcaacaaagtgccccttcctgttgacaagttggcacctttacctctggacaacattcttccctttatggatccattaaagcttcttctgaaaactctgggcatttctgttgagcaccttgtggaggggctaaggaagtgtgtaaatgagctgggaccagaggcttctgaagctgtgaagaaactgctggaggcgctatcacacttggtg

SEQ ID NO: 5907 - DNA, 864 bp, Homo Sapiens
aaatcgtgtgctccaaataaagcagatgtcattcttgtgttttgctatcccaaaaccatcatcaccaaaatccccgagtgtccctatggatgggaagttcatcagctggccctcggagggctgtgttacaatggggtccacgaaggaggttactaccaatttgtgatcccagatttatcacctaaaaacaagtcctattgtggaacccagtctgagtacaagccacctatctatcacttctacagtcacatcgtttccaatgacaccacagtgattgtaaaaaaccagcctgtcaactactccttctcctgcacctaccactccacctacttggtgaaccaggctgcctttgaccagagagtggccactgttcacgtgaagaacgggagcatgggcacatttgagagccaactgtctctcaacttctacactaatgccaagttctccatcaagaaagaagctccctttgtcctggaggcatcggaaatcggttcagatctgtttgcaggagtggaagccaaagggttaagcattaggtttaaagtggtcttgaacagctgttgggccaccccctcggctgacttcatgtatcccttgcagtggcagctgatcaacaagggctgccccacggatgaaaccgtcctcgtgcatgagaatgggagagatcacagggcaaccttccaattcaatgctttccggttccagaacatccccaaactctccaaggtgtggttacactgtgagacgttcatctgcgacagtgagaaactctcctgcccagtgacctgcgataaacggaagcgcctcctgcgagaccagaccgggggagtcctggttgtggagctctccctgcggagcagggga

SEQ ID NO: 5908 - DNA, 279 bp, Homo Sapiens
tgcgggattccactcaaccctgcccgggacctgggcccacgtctcttcacctacgtggctggctggggtcctgaagtcttcagtgctggtaatggctggtggtgggtgcctgtggtggcccctctggtgggggccaccgttggcacagccacttaccagctgttggtggctctgcaccaccctgagggcccagagccagctcaggatctggtgtctgctcaacacaaagcctcagagttggaaactcccgcctcagctcagatgctggagtgtaagcta

SEQ ID NO: 5909 - DNA, 2487 bp, Homo Sapiens
atcacatgtggtcaccctggaaaccctgcccacggattcactaatggcagtgagttcaacctgaatgatgtcgtgaatttcacctgcaacacgggctatttgctgcagggcgtgtctcgagcccagtgtcggagcaacggccagtggagtagccctctgcccacgtgtcgagtggtgaactgttctgatccaggctttgtggaaaatgccattcgtcacgggcaacagaacttccctgagagttttgagtatggaatgagtatcctgtaccattgcaagaagggattttacttgctgggatcttcagccttgacctgtatggcaaatggcttatgggaccgatccctgcccaagtgtttggctatatcctgtggacacccaggggtccctgccaacgccgtcctcactggagagctgtttacctatggcgccgtcgtgcactactcctgcagagggagcgagagcctcataggcaacgacacgagagtgtgccaggaagacagtcactggagcggggcactgccccactgcacaggaaataatcctggattctgtggtgatccggggaccccagcacatgggtctcggcttggtgatgactttaagacaaagagtcttctccgcttctcctgtgaaatggggcaccagctgaggggctcccctgaacgcacgtgtttgctcaatgggtcatggtcaggactgcagccggtgtgtgaggccgtgtcctgtggcaaccctggcacacccaccaacggaatgattgtcagtagtgatggcattctgttctccagctcggtcatctatgcctgctgggaaggctacaagacctcagggctcatgacacggcattgcacagccaatgggacctggacaggcactgctcccgactgcacaattataagttgtggggatccaggcacactagcaaatggcatccagtttgggaccgacttcaccttcaacaagactgtgagctatcagtgtaacccaggctatgtcatggaagcagtcacatccgccactattcgctgtaccaaagacggcaggtggaatccgagcaaacctgtctgcaaagccgtgctgtgtcctcagccgccgccggtgcagaatggaacagtggagggaagtgatttccgctggggctccagcataagttacagctgcatggacggttaccagctctctcactccgccatcctctcctgtgaaggtcgcggggtgtggaaaggagagatcccccagtgtctccctgtgttctgcggagaccctggcatccccgcagaagggcgacttagtgggaaaagtttcacctataagtccgaagtcttcttccagtgcaaatctccatttatactcgtgggatcctccagaagagtctgccaagctgacggcacgtggagcggcatacaacccacctgcattgatcctgctcataacacctgcccagaccctggtacgccacactttggaatacagaatagctccagaggctatgaggttggaagcacggtttttttcaggtgcagaaaaggctaccatattcaaggttccacgactcgcacctgccttgccaatttaacatggagtgggatacagaccgaatgtatacctcatgcctgcagacagccagaaaccccggcacacgcggatgtgagagccatcgatcttcctactttcggctacaccttagtgtacacctgccatccaggctttttcctcgcagggggatctgagcacagaacatgtaaagcagacatgaaatggacaggaaagtcgcctgtgtgtaaaagtaaaggagtgagagaagttaatgaaacagttactaaaactccagttccttcagatgtctttttcgtcaattcactgtggaaggggtattatgaatatttagggaaaagacaacccgccactctaactgttgactggttcaatgcaacaagcagtaaggtgaatgccaccttcagcgaagcctcgccagtggagctgaagttgacaggcatttacaagaaggaggaggcccacttactcctgaaagcttttcaaattaaaggccaggcagatatttttgtaagcaagttcgaaaatgacaactggggactagatggttatgtgtcatctggacttgaaagaggaggatttacttttcaaggtgacattcatggaaaagactttggaaaatttaagctagaaaggcaagatcctttaaacccagatcaagactcttccagtcattaccacggcaccagcagtggctctgtggcggctgccattctggttcctttctttgctctaattttatcagggtttgcattttacctctacaaacacagaacgagaccaaaagttcaatacaatggctatgctgggcatgaaaacagcaatggacaagcatcgtttgaaaaccccatgtatgatacaaacttaaaacccacagaagccaaggctgtgaggtttgacacaactctgaacacagtctgtacagtggta

SEQ ID NO: 5910 - DNA, 162 bp, Homo Sapiens
aagaaatttcaggttccgtgtcctgtggaagctgctttgataattaacgaaacaataaacaccaccttaacacagccaacagctcttgtacctgctttgtcacataacgtgactgaaaatgactcttgcagacctcactattttattttcaactcacagact

SEQ ID NO: 5911 - DNA, 282 bp, Homo Sapiens
tcagcccaagtttccccacgcatcacttttaagccaatagctccgtcaggtcagaacgccacttgcacaagatacagttactgtaatgaatgtatgttggatccagactgcggtttctgctacaagatgaacaaatcaactgtcattgactcctcctgtgttccagttaataaagcatctacaaatgaggcagcctggggcaggtgtgaaaatgaaaccaagttcaaaacagaagatatattttgggcttacaatttctgccctactccatactcctggact

SEQ ID NO: 5912 - DNA, 252 bp, Homo Sapiens
ttcttagtgggctcggccaagcctgtggcccagcctgtcgctgcgctggagtcggcggcggaggccggggccgggaccctggccaaccccctcggcaccctcaacccgctgaagctcctgctgagcagcctgggcatccccgtgaaccacctcatagagggctcccagaagtgtgtggctgagctgggtccccaggccgtgggggccgtgaaggccctgaaggccctgctgggggccctgacagtgtttggc

SEQ ID NO: 5913 - DNA, 159 bp, Homo Sapiens
gggtctccgatcagctgcttctctcccagtaacttcagcatccggcaggcagcctacgtggacagctcctgctgggactcactgcttcaccataagcaggacgggcctggccaggacaaaatgaaatctctctggccccacaaggccctcccctactcc

SEQ ID NO: 5914 - DNA, 1638 bp, Homo Sapiens
caggactggaaggctgaacgcagccaagaccccttcgagaaatgcatgcaggatcctgactatgagcagctgctcaaggtggtgacctgggggctcaatcggaccctgaagccccagagggtgattgtggttggcgctggtgtggccgggctggtggccgccaaggtgctcagcgatgctggacacaaggtcaccatcctggaggcagataacaggatcgggggccgcatcttcacctaccgggaccagaacatgggctggattggggagctgggagccatgcgcatgcccagctctcacaggatcctccacaagctctgccagggcctggggctcaacctgaccaagttcacccagtacgacaagaacacgtggacggaggtgcacgaagtgaagctgcgcaactatgtggtggagaaggtgcccgagaagctgggctacgccttgcgtccccaggaaaagggccactcgcccgaagacatctaccagatggctctcaaccaggccctcaaagacctcaaggcactgggctgcagaaaggcgatgaagaagtttgaaaggcacacgctcttggaatatcttctcggggaggggaacctgagccggccggccgtgcagcttctgggagacgtgatgtccgaggatggcttcttctatctcagcttcgccgaggccctccgggcccacagctgcctcagcgacagactccagtacagccgcatcgtgggtggctgggacctgctgccgcgcgcgctgctgagctcgctgtccgggcttgtgctgttgaacgcgcccgtggtggcgatgacccagggaccgcacgatgtgcacgtgcagatcgagacctctcccccggcgcggaatctgaaggtgctgaaggccgacgtggtgctgctgacggcgagcggaccggcggtgaagcgcatcaccttctcgccgccgctgccccgccacatgcaggaggcgctgcggaggctgcactacgtgccggccaccaaggtgttcctaagcttccgcaggcccttctggcgcgaggagcacattgaaggcggccactcaaacaccgatcgcccgtcgcgcatgattttctacccgccgccgcgcgagggcgcgctgctgctggcctcgtacacgtggtcggacgcggcggcagcgttcgccggcttgagccgggaagaggcgttgcgcttggcgctcgacgacgtggcggcattgcacgggcctgtcgtgcgccagctctgggacggcaccggcgtcgtcaagcgttgggcggaggaccagcacagccagggtggctttgtggtacagccgccggcgctctggcaaaccgaaaaggatgactggacggtcccttatggccgcatctactttgccggcgagcacaccgcctacccgcacggctgggtggagacggcggtcaagtcggcgctgcgcgccgccatcaagatcaacagccggaaggggcctgcatcggacacggccagccccgaggggcacgcatctgacatggaggggcaggggcatgtgcatggggtggccagcagcccctcgcatgacctggcaaaggaagaaggcagccaccctccagtccaaggccagttatctctccaaaacacgacccacacgaggacctcgcat

SEQ ID NO: 5915 - DNA, 330 bp, Homo Sapiens
catcacttgccagacagaagtcaactgtgtcggaaggtcaagttccaggtggacttcaacctgatcggatggggctcctggatcatctaccccaagcagtacaacgcctatcgctgtgagggcgagtgtcctaatcctgttggggaggagtttcatccgaccaaccatgcatacatccagagtctgctgaaacgttaccagccccaccgagtcccttccacttgttgtgccccagtgaagaccaagccgctgagcatgctgtatgtggataatggcagagtgctcctagatcaccataaagacatgatcgtggaagaatgtgggtgcctc

SEQ ID NO: 5916 - DNA, 348 bp, Homo Sapiens
catgatgatgactggattgaccccacagacatgcttaactatgatgctgcttcaggaacaatgagaaaatctcaggcaaaatatggtatttcaggggaaaaggatgtcagtcctgacttgtcatgtgctgatgaaatatcagaatgttatcacaaacttgattctttaacttataagattgatgagtgtgaaaagaaaaagagggaagactatgaaagtcaaagcaatcctgtttttaggagatacttaaataagattttaattgaagctggaaagcttggactttttcatgattttgaaacatggaagtggcgattcgaagattcctttggagtggatccatataat

SEQ ID NO: 5917 - DNA, 504 bp, Homo Sapiens
cagcaggagcaggacttctacgacttcaaggcggtcaacatccggggcaaactggtgtcgctggagaagtaccgcggatcggtgtccctggtggtgaatgtggccagcgagtgcggcttcacagaccagcactaccgagccctgcagcagctgcagcgagacctgggcccccaccacttcaacgtgctcgccttcccctgcaaccagtttggccaacaggagcctgacagcaacaaggagattgagagctttgcccgccgcacctacagtgtctcattccccatgtttagcaagattgcagtcaccggtactggtgcccatcctgccttcaagtacctggcccagacttctgggaaggagcccacctggaacttctggaagtacctagtagccccagatggaaaggtggtaggggcttgggacccaactgtgtcagtggaggaggtcagaccccagatcacagcgctcgtgaggaagctcatcctactgaagcgagaagactta

SEQ ID NO: 5918 - DNA, 318 bp, Homo Sapiens
caggaggcagtcatcccaggctgccacttgcaccccttcaatgtgacagtgcgaagtgaccgccaaggcacctgccagggctcccacgtggcacaggcctgtgtgggccactgtgagtccagcgccttcccttctcggtactctgtgctggtggccagtggttaccgacacaacatcacctccgtctctcagtgctgcaccatcagtggcctgaagaaggtcaaagtacagctgcagtgtgtggggagccggagggaggagctcgagatcttcacggccagggcctgccagtgtgacatgtgtcgcctctctcgctac

SEQ ID NO: 5919 - DNA, 525 bp, Homo Sapiens
atgcctctaccacctcatcctgggcaccctggttatatcaacttcagctatgaggtgcttacccctttgaagtggtaccagagcataaggccaccgtacccttcctatggttacgagcccatgggtggatggctgcaccaccaaatcatccccgtgctgtcccaacagcaccccccgactcacaccctgcagcctcatcaccacatcccagtggtgccagctcagcagcccgtgatcccccagcaaccaatgatgcccgttcctggccaacactccatgactccaatccaacaccaccagccaaacctccctccgcccgcccagcagccctaccagccccagcctgttcagccacagcctcaccagcccatgcagccccagccacctgtgcaccccatgcagcccctgccgccacagccacctctgcctccgatgttccccatgcagcccctgcctcccatgcttcctgatctgactctggaagcttggccatcaacagacaagaccaagcgggaggaagtggat

SEQ ID NO: 5920 - DNA, 528 bp, Homo Sapiens
atgcctctaccacctcatcctgggcaccctggttatatcaacttcagctatgaggtgctcacccctttgaagtggtaccagagcatgataagaccaccatactcttcctatggttacgagcccatgggtggatggctgcaccaccaaatcatccccgtggtgtcccaacagcaccccctgactcacaccctgcagtctcatcaccacatcccagtggtgccagctcagcagcccagggtccgccagcaagcactgatgcctgttcctggccagcaatccatgactccaacccaacaccatcagccaaacctccctctgcctgcccagcagcccttccagccccagcctgttcagccacagcctcaccagcccatgcagccccagccacctgtgcaacccatgcagcccctgctgccacagccacctctgcctccaatgttccccctgcggcccctgccccccatacttcctgatctgcatctggaagcttggccagcaacagacaagaccaagcaggaggaagtggat

SEQ ID NO: 5921 - DNA, 579 bp, Homo Sapiens
tccagcctgggtgtcgttacttgcggctccgtggtgaagctactcaatacgcgccacaacgtccgactgcactcacacgacgtgcgctatgggtcaggtagtgggcagcagtcagtgacaggtgtaacctctgtggatgacagcaacagttactggaggatacgggggaagagtgccacagtgtgtgagaggggaacccccatcaagtgtggccagcccatccggctgacacatgtcaacactggccgaaacctccatagtcaccacttcacttcacctctttctggaaaccaggaagtgagtgcttttggtgaggaaggtgaaggtgattatctggatgactggacagtgctctgtaatggaccctactgggtgagagatggtgaggtgcggttcaaacactcttccactgaggtactgctgtctgtcacaggagaacaatatggtcgacctatcagtgggcaaaaagaggtgcatggcatggcccagccaagtcagaacaactactggaaagccatggaaggcatcttcatgaagcccagtgagttgttgaaggcagaagcccaccatgcagagctg

SEQ ID NO: 5922 - DNA, 1104 bp, Homo Sapiens
gagaacgacttcggtctggtgcagccgctggtgaccatggagcaactgctgtgggtgagcgggagacagatcggctcagtggacaccttccgcatcccgctcatcacagccactccgcggggcactcttctcgcctttgctgaggcgaggaaaatgtcctcatccgatgagggggccaagttcatcgccctgcggaggtccatggaccagggcagcacatggtctcctacagcgttcattgtcaatgatggggatgtccccgatgggctgaaccttggggcagtagtgagcgatgttgagacaggagtagtatttcttttctactccctttgtgctcacaaggccggctgccaggtggcctctaccatgttggtatggagcaaggatgatggtgtttcctggagcacaccccggaatctctccctggatattggcactgaagtgtttgcccctggaccgggctctggtattcagaaacagcgggagccacggaagggccgcctcatcgtgtgtggccatgggacgctggagcgggacggagtcttctgtctcctcagcgatgatcatggtgcctcctggcgctacggaagtggggtcagcggcatcccctacggtcagcccaagcaggaaaatgatttcaatcctgatgaatgccagccctatgagctcccagatggctcagtcgtcatcaatgcccgaaaccagaacaactaccactgccactgccgaattgtcctccgcagctatgatgcctgtgatacactaaggccccgtgatgtgaccttcgaccctgagctcgtggaccctgtggtagctgcaggagctgtagtcaccagctccggcattgtcttcttctccaacccagcacatccagagttccgagtgaacctgaccctgcgatggagcttcagcaatggtacctcatggcggaaagagacagtccagctatggccaggccccagtggctattcatccctggcaaccctggagggcagcatggatggagaggagcaggccccccagctctacgtcctgtatgagaaaggccggaaccactacacagagagcatctccgtggccaaaatcagtgtctatgggacactc

SEQ ID NO: 5923 - DNA, 2034 bp, Homo Sapiens
agcgcgccgggcgaggacgaggagtgcggccgggtccgggacttcgtcgccaagctggccaacaacacgcaccagcatgtgtttgatgatctcagaggctcagtatccttgtcctgggttggagatagcactggggtcattctagtcttgactaccttccatgtaccactggtaattatgacttttggacagtccaagctatatcgaagtgaggattatgggaagaactttaaggatattacagatctcatcaataacacctttattcggactgaatttggcatggctattggtcctgagaactctggaaaggtggtgttaacagcagaggtgtctggaggaagtcgtggaggaagaatcttcagatcatcagattttgcgaagaattttgtgcaaacagatctcccttttcatcctctcactcagatgatgtatagccctcagaattctgattatcttttagctctcagcactgaaaatggcctgtgggtgtccaagaattttgggggaaaatgggaagaaatccacaaagcagtatgtttggccaaatggggatcagacaacaccatcttctttacaacctatgcaaatggctcctgcaaagctgaccttggggctctggaattatggagaacttcagacttgggaaaaagcttcaaaactattggtgtgaaaatctactcatttggtcttgggggacgtttcctttttgcctctgtgatggctgataaggataccacaagaaggatccacgtttcaacagatcaaggggacacatggagcatggcccagctcccctccgtgggacaggaacagttctattctattctggcagcaaatgatgacatggtattcatgcatgtagatgaacctggagacactgggtttggcacaatctttacctcagatgatcgaggcattgtctattccaagtctttggaccgacatctctacactaccacaggcggagagacggactttaccaacgtgacctccctccgcggcgtctacataacaagcgtgctctccgaagataattctatccagaccatgatcacttttgaccaaggaggaaggtggacgcacctgaggaagcctgaaaacagtgaatgtgatgctacagcaaaaaacaagaatgagtgcagccttcatattcatgcttcctacagcatctcccagaaactgaatgttccaatggccccactctcagagccgaatgccgtaggcattgtcattgctcatggtagcgtgggggatgccatctcagtgatggttccagatgtgtacatctcagatgatgggggttactcctggacaaagatgctggaaggaccccactattacaccatcctggattctggaggcatcattgtggccattgagcacagcagccgtcctatcaatgtgattaagttctccacagacgaaggtcaatgctggcaaacctacacgttcaccagggaccccatctatttcactggcctagcttcagaacctggagctaggtccatgaatatcagcatttggggcttcacagaatctttcctgaccagccagtgggtctcctacaccattgattttaaagatatccttgaaaggaactgtgaagagaaggactataccatatggctggcacactccacagaccctgaagattatgaagatggctgcattttgggctacaaagaacagtttctgcggctacgcaagtcatccgtgtgtcagaatggtcgagactatgttgtgaccaagcagccctccatctgcctctgttccctggaggactttctctgtgattttggctactaccgtccagaaaatgactccaagtgtgtggaacagccagaactgaagggccacgacctggagttttgtctgtacggaagagaagaacacctaacaacaaatgggtaccggaaaattccaggggacaaatgccagggtggggtaaatccagttcgagaagtaaaagacttgaaaaagaaatgcacaagcaactttttgagtccggaaaaacagaattccaagtcaaat

SEQ ID NO: 5924 - DNA, 918 bp, Homo Sapiens
attcctatagatgatcctgaagatggaggcaagcactgggtggtgatcgtggcaggttcaaatggctggtataattataggcaccaggcagacgcgtgccatgcctaccagatcattcaccgcaatgggattcctgacgaacagatcgttgtgatgatgtacgatgacattgcttactctgaagacaatcccactccaggaattgtgatcaacaggcccaatggcacagatgtctatcagggagtcccgaaggactacactggagaggatgttaccccacaaaatttccttgctgtgttgagaggcgatgcagaagcagtgaagggcataggatccggcaaagtcctgaagagtggcccccaggatcacgtgttcatttacttcactgaccatggatctactggaatactggtttttcccaatgaagatcttcatgtaaaggacctgaatgagaccatccattacatgtacaaacacaaaatgtaccgaaagatggtgttctacattgaagcctgtgagtctgggtccatgatgaaccacctgccggataacatcaatgtttatgcaactactgctgccaaccccagagagtcgtcctacgcctgttactatgatgagaagaggtccacgtacctgggggactggtacagcgtcaactggatggaagactcggacgtggaagatctgactaaagagaccctgcacaagcagtaccacctggtaaaatcgcacaccaacaccagccacgtcatgcagtatggaaacaaaacaatctccaccatgaaagtgatgcagtttcagggtatgaaacgcaaagccagttctcccgtccccctacctccagtcacacaccttgacctcacccccagccctgatgtgcctctcaccatcatgaaaaggaaactgatgaacaccaat

SEQ ID NO: 5925 - DNA, 1233 bp, Homo Sapiens
tacctgttgctgggccgctggagaaagaagcacctgactttccgcatcttgaacctgccctccacccttccaccccacacagcccgggcagccctgcgtcaagccttccaggactggagcaatgtggctcccttgaccttccaagaggtgcaggctggtgcggctgacatccgcctctccttccatggccgccaaagctcgtactgttccaatacttttgatgggcctgggagagtcctggcccatgccgacatcccagagctgggcagtgtgcacttcgacgaagacgagttctggactgaggggacctaccgtggggtgaacctgcgcatcattgcagcccatgaagtgggccatgctctggggcttgggcactcccgatattcccaggccctcatggccccagtctacgagggctaccggccccactttaagctgcacccagatgatgtggcagggatccaggctctctatggcaagaagagtccagtgataagggatgaggaagaagaagagacagagctgcccactgtgcccccagtgcccacagaacccagtcccatgccagacccttgcagtagtgaactggatgccatgatgctggggccccgtgggaagacctatgctttcaagggggactatgtgtggactgtatcagattcaggaccgggccccttgttccgagtgtctgccctttgggaggggctccccggaaacctggatgctgctgtctactcgcctcgaacacaatggattcacttctttaagggagacaaggtgtggcgctacattaatttcaagatgtctcctggcttccccaagaagctgaatagggtagaacctaacctggatgcagctctctattggcctctcaaccaaaaggtgttcctctttaagggctccgggtactggcagtgggacgagctagcccgaactgacttcagcagctaccccaaaccaatcaagggtttgtttacgggagtgccaaaccagccctcggctgctatgagttggcaagatggccgagtctacttcttcaagggcaaagtctactggcgcctcaaccagcagcttcgagtagagaaaggctatcccagaaatatttcccacaactggatgcactgtcgtccccggactatagacactaccccatcaggtgggaataccactccctcaggtacgggcataaccttggataccactctctcagccacagaaaccacgtttgaatac

SEQ ID NO: 5926 - DNA, 852 bp, Homo Sapiens
caggaaactgactccgtggtcagctccgttacgaccaaggtcaagggcgtggctgtgaccaacacttctaaacttggattccggatctgggatgtggcggattatgtgataccagctcaggaggaaaactccctcttcgtcatgaccaacgtgatcctcaccatgaaccagacacagggcctgtgccccgagattccagatgcgaccactgtgtgtaaatcagatgccagctgtactgccggctctgccggcacccacagcaacggagtctcaacaggcaggtgcgtagctttcaacgggtccgtcaagacgtgtgaggtggcggcctggtgcccggtggaggatgacacacacgtgccacaacctgcttttttaaaggctgcagaaaacttcactcttttggttaagaacaacatctggtatcccaaatttaatttcagcaagaggaatatccttcccaacatcaccactacttacctcaagtcgtgcatttatgatgctaaaacagatcccttctgccccatattccgtcttggcaaaatagtggagaacgcaggacacggtttccaggacatggccgtggagggaggcatcatgggcatccaggtcaactgggactgcaacctggacagagccgcctccctctgcttgcccaggtactccttccgccgcctcgatacacgggacgttgagcacaacgtatctcctggctacaatttcaggtttgccaagtactacagagacctggctggcaacgagcagcgcacgctcatcaaggcctatggcatccgcttcgacatcattgtgtttgggaaggcagggaaatttgacatcatccccactatgatcaac

SEQ ID NO: 5927 - DNA, 864 bp, Homo Sapiens
agtgacaagctgtaccagcggaaagagcctgtcatcagttctgtgcacaccaaggtgaaggggatagcagaggtgaaagaggagatcgtggagaatggagtgaagaagttggtgcacagtgtctttgacaccgcagactacaccttccctttgcaggggaactctttcttcgtgatgacaaactttctcaaaacagaaggccaagagcagcggttgtgtcccgagtatcccacccgcaggacgctctgttcctctgaccgaggttgtaaaaagggatggatggacccgcagagcaaaggaattcagaccggaaggtgtgtagtgcatgaagggaaccagaagacctgtgaagtctctgcctggtgccccatcgaggcagtggaagaggccccccggcctgctctcttgaacagtgccgaaaacttcactgtgctcatcaagaacaatatcgacttccccggccacaactacaccacgagaaacatcctgccaggtttaaacatcacttgtaccttccacaagactcagaatccacagtgtcccattttccgactaggagacatcttccgagaaacaggcgataatttttcagatgtggcaattcagggcggaataatgggcattgagatctactgggactgcaacctagaccgttggttccatcactgccatcccaaatacagtttccgtcgccttgacgacaagaccaccaacgtgtccttgtaccctggctacaacttcagatacgccaagtactacaaggaaaacaatgttgagaaacggactctgataaaagtcttcgggatccgttttgacatcctggtttttggcaccggaggaaaatttgacattatccagctggtt

SEQ ID NO: 5928 - DNA, 294 bp, Homo Sapiens
atggcagcagaaccactgacagagctagaggagtccattgagaccgtggtcaccaccttcttcacctttgcaaggcaggagggccggaaggatagcctcagcgtcaacgagttcaaagagctggttacccagcagttgccccatctgctcaaggatgtgggctctcttgatgagaagatgaagagcttggatgtgaatcaggactcggagctcaagttcaatgagtactggagattgattggggagctggccaaggaaatcaggaagaagaaagacctgaagatcaggaagaag

SEQ ID NO: 5929 - DNA, 846 bp, Homo Sapiens
gccccaaaggatggagtcacaaggccagactctgaagtgcagcatcagctcctgcccaaccccttccagccaggccaggagcagctcggacttctgcagagctacctaaagggactaggaaggacagaagtgcaactggagcatctgagccgggagcaggttctcctctacctctttgccctccatgactatgaccagagtggacagctggatggcctggagctgctgtccatgttgacagctgctctggcccctggagctgccaactctcctaccaccaacccggtgatattgatagtggacaaagtgctcgagacgcaggacctgaatggggatgggctcatgacccctgctgagctcatcaacttcccgggagtagccctcaggcacgtggagcccggagagccccttgctccatctcctcaggagccacaagctgttggaaggcagtccctattagctaaaagcccattaagacaagaaacacaggaagcccctggtcccagagaagaagcaaagggccaggtagaggccagaagggagtctttggatcctgtccaggagcctgggggccaggcagaggctgatggagatgttccagggcccagaggggaagctgagggccaggcagaggctaaaggagatgcccctgggcccagaggggaagctgggggccaggcagaggctgaaggagatgcccccgggcccagaggggaagctgggggccaggcagaggccagggagaatggagaggaggccaaggaacttccaggggaaacactggagtctaagaacacccaaaatgactttgaggtgcacattgttcaagtggagaatgatgagatc

SEQ ID NO: 5930 - DNA, 585 bp, Homo Sapiens
tgcagctgcgccccggcgcaccctcagcagcacatctgccactcggcacttgtgattcgggccaaaatctccagtgagaaggtagttccggccagtgcagaccctgctgacactgaaaaaatgctccggtatgaaatcaaacagataaagatgttcaaagggtttgagaaagtcaaggatgttcagtatatctatacgccttttgactcttccctctgtggtgtgaaactagaagccaacagccagaagcagtatctcttgactggtcaggtcctcagtgatggaaaagtcttcatccatctgtgcaactacatcgagccctgggaggacctgtccttggtgcagagggaaagtctgaatcatcactaccatctgaactgtggctgccaaatcaccacctgctacacagtaccctgtaccatctcggcccctaacgagtgcctctggacagactggctgttggaacgaaagctctatggttaccaggctcagcattatgtctgtatgaagcatgttgacggcacctgcagctggtaccggggccacctgcctctcaggaaggagtttgttgacatcgttcagccc

SEQ ID NO: 5931 - DNA, 1302 bp, Homo Sapiens
ctgcccaccaaccctgaggagagctggcaggtgtacagctctgcccaggacagcgagggcaggtgtatctgcacagtggtcgccccacagcagaccatgtgttcacgggatgcccgcacaaaacagctgaggcagctactggagaaggtgcagaacatgtctcaatccatagaggtcttggacaggcggacccagagagacttgcagtacgtggagaagatggagaaccaaatgaaaggactggagtccaagttcaaacaggtggaggagagtcataagcaacacctggccaggcagtttaaggcgataaaagcgaaaatggatgaacttaggcctttgatacctgtgttggaagagtacaaggccgatgccaaattggtattgcagtttaaagaggaggtccagaatctgacgtcagtgcttaacgagctgcaagaggaaattggcgcctatgactacgatgaacttcagagcagagtgtccaatcttgaagaaaggctccgtgcatgcatgcaaaaactagcttgcgggaagttgacgggcatcagtgaccccgtgactgtcaagacctccggctcgaggttcggatcctggatgacagaccctctcgcccctgaaggcgataaccgggtgtggtacatggacggctatcacaacaaccgcttcgtacgtgagtacaagtccatggttgacttcatgaacacggacaatttcacctcccaccgtctcccccacccctggtcgggcacggggcaggtggtctacaacggttctatctacttcaacaagttccagagccacatcatcatcaggtttgacctgaagacagagaccatcctcaagacccgcagcctggactatgccggttacaacaacatgtaccactacgcctggggtggccactcggacatcgacctcatggtggacgagagcgggctgtgggccgtgtacgccaccaaccagaacgctggcaacatcgtggtcagtaggctggaccccgtgtccctgcagaccctgcagacctggaacacgagctaccccaagcgcagcgccggggaggccttcatcatctgcggcacgctgtacgtcaccaacggctactcagggggtaccaaggtccactatgcataccagaccaatgcctccacctatgaatacatcgacatcccattccagaacaaatactcccacatctccatgctggactacaaccccaaggaccgggccctgtatgcctggaacaacggccaccagatcctctacaacgtgaccctcttccacgtcatccgctccgacgagttg

SEQ ID NO: 5932 - DNA, 618 bp, Homo Sapiens
cggggggcggcctcgagcgggaacgcgaccgggcctgggcctcggagcgcgggcgggagcgcgaggaggagcgcggcggtgactggccctccgccgccgctgagccactgcggccgggctgccccctgcgagccgctgcgctacaacgtgtgcctgggctcggtgctgccctacggggccacctccacactgctggccggagactcggactcccaggaggaagcgcacggcaagctcgtgctctggtcgggcctccggaatgccccccgctgctgggcagtgatccagcccctgctgtgtgccgtatacatgcccaagtgtgagaatgaccgggtggagctgcccagccgtaccctctgccaggccacccgaggcccctgtgccatcgtggagagggagcggggctggcctgacttcctgcgctgcactcctgaccgcttccctgaaggctgcacgaatgaggtgcagaacatcaagttcaacagttcaggccagtgcgaagtgcccttggttcggacagacaaccccaagagctggtacgaggacgtggagggctgcggcatccagtgccagaacccgctcttcacagaggctgagcaccaggacatgcacagctac

SEQ ID NO: 5933 - DNA, 231 bp, Homo Sapiens
gcctacgtgctcttctacctcttcgcctccctcaccagcgacctaccctgggagcactgtggcaactggtggaacacagaactctgcctggagcacagagtctccaaggacggcaacggggccctgcccctcaacctcacctgcaccgtcagccccagcgaggagtactggagccgctacgtcctccacatccaaggcagccagggcatcggcagccctggggagatccgc

SEQ ID NO: 5934 - DNA, 717 bp, Homo Sapiens
gtggtgggaggagaggatgcccggccccacagctggccctggcagatctccctccagtacctcaagaacgacacgtggaggcatacgtgtggcgggactttgattgctagcaacttcgtcctcactgccgcccactgcatcagcaacacccggacctaccgtgtggccgtgggaaagaacaacctggaggtggaagacgaagaaggatccctgtttgtgggtgtggacaccatccacgtccacaagagatggaatgccctcctgttgcgcaatgatattgccctcatcaagcttgcagagcatgtggagctgagtgacaccatccaggtggcctgcctgccagagaaggactccctgctccccaaggactacccctgctatgtcaccggctggggccgcctctggaccaacggccccattgctgataagctgcagcagggcctgcagcccgtggtggatcacgccacgtgctccaggattgactggtggggcttcagggtgaagaaaaccatggtgtgcgctgggggcgatggcgtcatctcagcctgcaatggggactccggtggcccactgaactgccagttggagaacggttcctgggaggtgtttggcatcgtcagctttggctcccggcggggctgcaacacccgcaagaagccggtagtctacacccgggtgtccgcctacatcgactggatcaacgagaaaatgcagctg

SEQ ID NO: 5935 - DNA, 207 bp, Homo Sapiens
cgaggacgcaacgtcgagaacatgaagatcttgcgtctaatgctgctccacatcaaatacctgtacgggatccgagtggaggtgcgaggggctcaccacttccctccctcgcagccctatgttgttgtctccaaccaccagagctctctcgatctgcttgggatgatggaggtactgccaggccgctgtgtgcccattgccaagcgc

SEQ ID NO: 5936 - DNA, 336 bp, Homo Sapiens
caaagaggccccaggggaccatatccacctggaccactggctcctcctcctccaccacgttttccttttggaacaggatttgttccaccaccccatcctccaccctatggtccagggagatttccaccacccctttctccaccctatggtccagggagaatcccaccatcccctcctccaccctatggtccagggagaattcaatcacactctcttcctcctccttatggcccaggttatccacagccaccttcccaaccaagaccctatccacctggacctccatttttccctgtaaattctccaactgatcctgccctccctactcttgcaccc

SEQ ID NO: 5937 - DNA, 411 bp, Homo Sapiens
gagctcacggaagcccagcgccggggcctgcaggtggccctggaggaatttcacaagcacccgcccgtgcagtgggccttccaggagaccagtgtggagagcgccgtggacacgcccttcccagctggaatatttgtgaggctggaatttaagctgcagcagacaagctgccggaagagggactggaagaaacccgagtgcaaagtcaggcccaatgggaggaaacggaaatgcctggcctgcatcaaactgggctctgaggacaaagttctgggccggttggtccactgccccatagagacccaagttctgcgggaggctgaggagcaccaggagacccagtgcctcagggtgcagcgggctggtgaggacccccacagcttctacttccctggacagttcgccttctcc

SEQ ID NO: 5938 - DNA, 1416 bp, Homo Sapiens
aggacagctcagctcaggaaggccaatgaccagagtggccgatgccagtataccttcagtgtggccagtcccaatgaatccagctgcccagagcagagccaggccatgtcagtcatccataacttacagagagacagcagcacccaacgcttagacctggaggccaccaaagctcgactcagctccctggagagcctcctccaccaattgaccttggaccaggctgccaggccccaggagacccaggaggggctgcagagggagctgggcaccctgaggcgggagcgggaccagctggaaacccaaaccagagagttggagactgcctacagcaacctcctccgagacaagtcagttctggaggaagagaagaagcgactaaggcaagaaaatgagaatctggccaggaggttggaaagcagcagccaggaggtagcaaggctgagaaggggccagtgtccccagacccgagacactgctcgggctgtgccaccaggctccagagaagtttctacgtggaatttggacactttggccttccaggaactgaagtccgagctaactgaagttcctgcttcccgaattttgaaggagagcccatctggctatctcaggagtggagagggagacaccggatgtggagaactagtttgggtaggagagcctctcacgctgagaacagcagaaacaattactggcaagtatggtgtgtggatgcgagaccccaagcccacctacccctacacccaggagaccacgtggagaatcgacacagttggcacggatgtccgccaggtttttgagtatgacctcatcagccagtttatgcagggctacccttctaaggttcacatactgcctaggccactggaaagcacgggtgctgtggtgtactcggggagcctctatttccagggcgctgagtccagaactgtcataagatatgagctgaataccgagacagtgaaggctgagaaggaaatccctggagctggctaccacggacagttcccgtattcttggggtggctacacggacattgacttggctgtggatgaagcaggcctctgggtcatttacagcaccgatgaggccaaaggtgccattgtcctctccaaactgaacccagagaatctggaactcgaacaaacctgggagacaaacatccgtaagcagtcagtcgccaatgccttcatcatctgtggcaccttgtacaccgtcagcagctacacctcagcagatgctaccgtcaactttgcttatgacacaggcacaggtatcagcaagaccctgaccatcccattcaagaaccgctataagtacagcagcatgattgactacaaccccctggagaagaagctctttgcctgggacaacttgaacatggtcacttatgacatcaagctctccaagatg

SEQ ID NO: 5939 - DNA, 990 bp, Homo Sapiens
ggctggacagtggctggacagttccaagaaaagaaacgcttcactgaagaagtcattgaatacttccagaagaaagttagcccagtgcatctgaaaatcctgctgactagcgatgaagcctggaagagatttgtgcgtgtggctgaattgcccagggaagaggcagatgctctctatgaagctctgaagaatcttacaccatatgtggctattgaggacaaagacatgcagcaaaaagaacagcagtttagggagtggtttttgaaagagtttcctcaaatcagatggaagattcaggagtccatagaaaggcttcgtgtcattgcaaatgagattgaaaaggtccacagaggctgcgtcatcgccaatgtggtgtctggctccactggcatcctgtctgtcattggcgttatgttggcaccatttacagcagggctgagcctgagcattactgcagctggggtagggctgggaatagcatctgccacggctgggatcgcctccagcatcgtggagaacacatacacaaggtcagcagaactcacagccagcaggctgactgcaaccagcactgaccaattggaggcattaagggacattctgcgtgacatcacacccaatgtgctttcttttgcacttgattttgacgaagccacaaaaatgattgcgaatgatgtccatacactcaggagatctaaagccactgttggacgccctttgattgcttggcgatatgtacctataaatgttgttgagacactgagaacacgtggggcccccacccggatagtgagaaaagtagcccggaacctgggcaaggccacttcaggtgtccttgttgtgctggatgtagtcaaccttgtgcaagactcactggacttgcacaagggggcaaaatccgagtctgctgagtcgctgaggcagtgggctcaggagctggaggagaatctcaatgagctcacccatatccatcagagtctaaaagcaggc

SEQ ID NO: 5940 - DNA, 264 bp, Homo Sapiens
cagtgttccttagactccgttatggataagaagatcaaggatgttctcaacagtctagagtacagtccctctcctataagcaagaagctctcgtgtgctagtgtcaaaagccaaggcagaccgtcctcctgccctgctgggatggctgtcactggctgtgcttgtggctatggctgtggttcgtgggatgttcagctggaaaccacctgccactgccagtgcagtgtggtggactggaccactgcccgctgctgccacctgacc

SEQ ID NO: 5941 - DNA, 1236 bp, Homo Sapiens
gctgccgcggcggtggctgcagccggggggcggtcggacggcggtaattttctggatgataaacaatggctcaccacaatctctcagtatgacaaggaagtcggacagtggaacaaattccgagacgatgattatttccgcacttggagtccaggaaaacccttcgatcaggctttagatccagctaaggatccatgcttaaagatgaaatgtagtcgccataaagtatgcattgctcaagattctcagactgcagtctgcattagtcaccggaggcttacacacaggatgaaagaagcaggagtagaccataggcagtggaggggtcccatattatccacctgcaagcagtgcccagtggtctatcccagccctgtttgtggttcagatggtcatacctactcttttcagtgcaaactagaatatcaggcatgtgtcttaggaaaacagatctcagtcaaatgtgaaggacattgcccatgtccttcagataagcccaccagtacaagcagaaatgttaagagagcatgcagtgacctggagttcagggaagtggcaaacagattgcgggactggttcaaggcccttcatgaaagtggaagtcaaaacaagaagacaaaaacattgctgaggcctgagagaagcagattcgataccagcatcttgccaatttgcaaggactcacttggctggatgtttaacagacttgatacaaactatgacctgctattggaccagtcagagctcagaagcatttaccttgataagaatgaacagtgtaccaaggcattcttcaattcttgtgacacatacaaggacagtttaatatctaataatgagtggtgctactgcttccagagacagcaagacccaccttgccagactgagctcagcaatattcagaagcggcaaggggtaaagaagctcctaggacagtatatccccctgtgtgatgaagatggttactacaagccaacacaatgtcatggcagtgttggacagtgctggtgtgttgacagatatggaaatgaagtcatgggatccagaataaatggtgttgcagattgtgctatagattttgagatctccggagattttgctagtggcgattttcatgaatggactgatgatgaggatgatgaagacgatattatgaatgatgaagatgaaattgaagatgatgatgaagatgaaggggatgatgatgatggtggtgatgaccatgatgtatacatt

SEQ ID NO: 5942 - DNA, 570 bp, Homo Sapiens
caggggtggcaggcgttcaagaatgatgccacggaaatcatccccgagctcggagagtaccccgagcctccaccggagctggagaacaacaagaccatgaaccgggcggagaacggagggcggcctccccaccacccctttgagaccaaagacgtgtccgagtacagctgccgcgagctgcacttcacccgctacgtgaccgatgggccgtgccgcagcgccaagccggtcaccgagctggtgtgctccggccagtgcggcccggcgcgcctgctgcccaacgccatcggccgcggcaagtggtggcgacctagtgggcccgacttccgctgcatccccgaccgctaccgcgcgcagcgcgtgcagctgctgtgtcccggtggtgaggcgccgcgcgcgcgcaaggtgcgcctggtggcctcgtgcaagtgcaagcgcctcacccgcttccacaaccagtcggagctcaaggacttcgggaccgaggccgctcggccgcagaagggccggaagccgcggccccgcgcccggagcgccaaagccaaccaggccgagctggagaacgcctac

SEQ ID NO: 5943 - DNA, 557 bp, Homo Sapiens
tgccagctgccctccgagtggaggcccctgagcgagggctgccgcgccgagctggccgagaccatcgtgtacgccagggtgctggcgctgcaccccgaggcgcccggcctctacaaccacctgccctggcagtaccacgccggccaggggggcctcttctactcggccgaggtcgagatgctgtgcgaccaggcgtggggcagcatgctggaggtgcccgccggctccaggctcaacctcaccggcctgggctacttctcgtgccactcccacaccgtggtccaggactactcctatttcttcttcctcaggatggatgaaaattataacctcttgcctcacggagtcaatttccaagatgccatcttcccagacactcaagagaacagaaggatgttttctagccttttccagttttcaaactgttcgcaagggcagcagctggcgactttctccagtgactgggaaatccaggaagacagtaggctcatgtgctcctcggtgcagaaggccttgtttgaggaggaggaccacgtcaagaaactgcagcagaaagt

SEQ ID NO: 5944 - DNA, 3261 bp, Homo Sapiens
gccactcgagtctactacctgggcatccgggatgtgcagtggaactatgctcccaagggaagaaatgtcatcacgaaccagcctctggacagtgacatagtggcttccagcttcttaaagtctgacaagaaccggatagggggaacctacaagaagaccatctataaagaatacaaggatgactcatacacagatgaagtggcccagcctgcctggttgggcttcctggggccagtgttgcaggctgaagtgggggatgtcattcttattcacctgaagaattttgccactcgtccctataccatccaccctcatggtgtcttctacgagaaggactctgaaggttccctatacccagatggctcctctgggccactgaaagctgatgactctgttcccccggggggcagccatatctacaactggaccattccagaaggccatgcacccaccgatgctgacccagcgtgcctcacctggatctaccattctcatgtagatgctccacgagacattgcaactggcctaattgggcctctcatcacctgtaaaagaggagccctggatgggaactcccctcctcaacgccaggatgtagaccatgatttcttcctcctcttcagtgtggtagatgagaacctcagctggcatctcaatgagaacattgccacttactgctcagatcctgcttcagtggacaaagaagatgagacatttcaggagagcaataggatgcatgcaatcaatggctttgtttttgggaatttacctgagctgaacatgtgtgcacagaaacgtgtggcctggcacttgtttggcatgggcaatgaaattgatgtccacacagcatttttccatggacagatgctgactacccgtggacaccacactgatgtggctaacatctttccagccacctttgtgactgctgagatggtgccctgggaacctggtacctggttaattagctgccaagtgaacagtcactttcgagatggcatgcaggcactctacaaggtcaagtcttgctccatggcccctcctgtggacctgctcacaggcaaagttcgacagtacttcattgaggcccatgagattcaatgggactatggcccgatggggcatgatgggagtactgggaagaatttgagagagccaggcagtatctcagataagtttttccagaagagctccagccgaattgggggcacttactggaaagtgcgatatgaagcctttcaagatgagacattccaagagaagatgcatttggaggaagataggcatcttggaatcctggggccagtgatccgggctgaggtgggtgacaccattcaggtggtcttctacaaccgtgcctcccagccattcagcatgcagccccatggggtcttttatgagaaagactatgaaggcactgtgtacaatgatggctcatcttaccctggcttggttgccaagccctttgagaaagtaacataccgctggacagtcccccctcatgccggtcccactgctcaggatcctgcttgtctcacttggatgtacttctctgctgcagatcccataagagacacaaattctggcctggtgggcccgctgctggtgtgcagggctggtgccttgggtgcagatggcaagcagaaaggggtggataaagaattctttcttctcttcactgtgttggatgagaacaagagctggtacagcaatgccaatcaagcagctgctatgttggatttccgactgctttcagaggatattgagggcttccaagactccaatcggatgcatgccattaatgggtttctgttctctaacctgcccaggctggacatgtgcaagggtgacacagtggcctggcacctgctcggcctgggcacagagactgatgtgcatggagtcatgttccagggcaacactgtgcagcttcagggcatgaggaagggtgcagctatgctctttcctcatacctttgtcatggccatcatgcagcctgacaaccttgggacatttgagatttattgccaggcaggcagccatcgagaagcagggatgagggcaatctataatgtctcccagtgtcctggccaccaagccacccctcgccaacgctaccaagctgcaagaatctactatatcatggcagaagaagtagagtgggactattgccctgaccggagctgggaacgggaatggcacaaccagtctgagaaggacagttatggttacattttcctgagcaacaaggatgggctcctgggttccagatacaagaaagctgtattcagggaatacactgatggtacattcaggatccctcggccaaggactggaccagaagaacacttgggaatcttgggtccacttatcaaaggtgaagttggtgatatcctgactgtggtattcaagaataatgccagccgcccctactctgtgcatgctcatggagtgctagaatctactactgtctggccactggctgctgagcctggtgaggtggtcacttatcagtggaacatcccagagaggtctggccctgggcccaatgactctgcttgtgtttcctggatctattattctgcagtggatcccatcaaggacatgtatagtggcctggtggggcccttggctatctgccaaaagggcatcctggagccccatggaggacggagtgacatggatcgggaatttgcattgttgttcttgatttttgatgaaaataagtcttggtatttggaggaaaatgtggcaacccatgggtcccaggatccaggcagtattaacctacaggatgaaactttcttggagagcaataaaatgcatgcaatcaatgggaaactctatgccaaccttaggggtcttaccatgtaccaaggagaacgagtggcctggtacatgctggccatgggccaagatgtggatctacacaccatccactttcatgcagagagcttcctctatcggaatggcgagaactaccgggcagatgtggtggatctgttcccagggacttttgaggttgtggagatggtggccagcaaccctgggacatggctgatgcactgccatgtgactgaccatgtccatgctggcatggagaccctcttcactgttttttctcgaacagaacacttaagccctctcaccgtcatcaccaaagagactgaaaaagcagtgccccccagagacattgaagaaggcaatgtgaagatgctgggcatgcagatccccataaagaatgttgagatgctggcctct

SEQ ID NO: 5945 - DNA, 2484 bp, Homo Sapiens
aacaaagccaacaagcacaagccatggattgaggcagagtaccagggcatcgtcatggagaatgacaacacggtcctactgaatccaccactctttgccttggacaaggatgccccgctgcgctatgcaggtgagatctgcggcttccggctccatgggtctggggtgccctttgaggctgtgatccttgacaaggcgacaggagaggggctgatccgggccaaggagcctgtggactgcgaggcccagaaggaacacaccttcaccatccaggcctatgactgtggcgagggccccgacggggccaacaccaagaagtcccacaaggccactgtgcatgtgcgggtcaacgatgtgaacgagtttgccccagtgtttgtggaacggctgtatcgtgcggctgtgacagaggggaagctgtacgatcgcatcctgcgggtggaagccattgacggtgactgctccccccagtacagccagatctgctactatgagattctcacacccaacacccctttcctcattgacaatgacgggaacattgagaacacagagaagctgcagtacagtggtgagaggctctataagtttacagtgacagcttatgactgtgggaagaagcgggcagcagatgatgctgaggtggagattcaggtgaagcccacctgtaaacccagctggcaaggctggaacaaaaggatcgaatatgcaccaggtgctgggagcttggctttgttccctggtatccgcctggagacctgtgatgaaccactctggaacattcaggccaccatagagctgcagaccagccatgtggccaagggctgtgaccgtgacaactactcagagcgggcgctgcggaaactctgtggtgctgccactggggaggtggatctgttgcccatgcctggccccaatgccaactggacagcaggactctcggtgcactacagccaggacagcagcctgatctactggttcaatggcacccaggctgtgcaggtgcccctgggtggccccagtgggctgggctctgggccccaggacagcctcagtgaccacttcaccctgtccttctggatgaagcatggcgtaactcccaacaagggcaagaaggaagaggaaaccatcgtatgtaacactgtccagaatgaggacggcttctctcactactcgctgactgtccacggctgtaggattgccttcctctactggcccctgcttgagagtgcccgcccagtcaagttcctctggaagctggagcaggtctgtgatgatgagtggcaccactacgctctgaacctcgagttccccacagtcacactctataccgacggcatctccttcgaccctgccctcatccatgacaatggcctcatccacccaccccgaagggagcctgctctcatgattggggcctgctggactgaggagaagaacaaagagaaggaaaagggagacaacagtacagacaccacccaaggagaccctttgtcgatccaccactacttccatggctacctggctggtttcagcgtgcgctcaggtcgcctggagagccgcgaggtcatcgagtgcctctatgcatgtcgggaggggctggactatagggatttcgagagcctgggcaaaggcatgaaggtccacgtgaacccctcacagtccctgctcaccctggagggggatgatgtggagaccttcaaccatgccctgcagcatgtggcttacatgaacactctgcgctttgccacgcccggcgtcaggcccctgcgcctcaccactgctgtcaagtgcttcagcgaagagtcctgcgtctccatccctgaagtggagggctacgtggtcgtccttcagcctgacgccccccagatcctgctgagtggcactgctcattttgcccgcccagctgtggactttgagggaaccaacggcgtccctttgttccctgatcttcaaatcacctgctccatttctcaccaggtggaggccaaaaaggatgagagttggcagggcacagtgacagacacacgcatgtcggatgagattgtgcacaacctggatggctgtgaaatttctctggtgggggatgacctggatcccgagcgggaaagcctgctcctggacacaacctctctgcagcagcgggggctggagctcaccaacacatctgcctacctcactattgctggggtggagagcatcactgtgtatgaagagatcctgaggcaggctcgttatcggctgcgacacggagctgccctctacaccaggaagttccggctttcctgctcggaaatgaatggccgttactccagcaatgaattcatcgtggaggtcaatgtcctgcacagcatgaaccgggttgcccaccccagccacgtgctcagctcccagcagttcctgcaccgtggtcaccagcccccgcctgagatggctggacacagcctagccagctcccacagaaactccatgatacccagcgcc

SEQ ID NO: 5946 - DNA, 183 bp, Homo Sapiens
gaaggcatccttggcaagccgtgtcccaaaatcaaagtggaatgcgaagtggaagaaatagaccagtgtaccaaacccagagattgcccagaaaacatgaagtgttgcccgttcagccgtggaaagaaatgtttagacttcagaaaggtcagccttactttataccataaggaggagcttgaa

SEQ ID NO: 5947 - DNA, 978 bp, Homo Sapiens
cggcctgccaaccactcgtccactcgagagagagtagccaacagggaggagaatgagatcctgcccccagaccacctgaacggggtgaagctggagatggacgggcacctcaatcgcggcttccaccaggaggtcttcctaggcaaggacctgggtggctttgatgaggacgcggagccgcggcggagccggaggaagctgatggtcatcttttccaaggtggatgtgaacactgaccggaagatcagtgccaaggagatgcagcgctggatcatggagaagacggccgagcacttccaggaggccatggaggagagcaagacacacttccgcgccgtggaccctgacggggacggtcacgtgtcttgggacgagtataaggtgaagtttttggcgagtaaaggccatagcgagaaggaggttgccgacgccatcaggctcaacgaggaactcaaagtggacgaggaaacacaggaagtcctggagaacctgaaggaccgctggtaccaggcggacagcccccctgcagacctgctgctgacggaggaggagttcctgtcgttcctccaccccgagcacagccggggaatgctcaggttcatggtgaaggagatcgtccgggacctggaccaggacggtgacaagcagctctctgtgcccgagttcatctccctgcccgtgggcaccgtggagaaccagcagggccaggacattgacgacaactgggtgaaagacagaaaaaaggagtttgaggagctcattgactccaaccacgacggcatcgtgaccgccgaggagctggagagctacatggaccccatgaacgagtacaacgcgctgaacgaggccaagcagatgatcgccgtcgccgacgagaaccagaaccaccacctggagcccgaggaggtgctcaagtacagcgagttcttcacgggcagcaagctggtggactacgcgcgcagcgtgcacgaggagttt

SEQ ID NO: 5948 - DNA, 450 bp, Homo Sapiens
ggtgagcaatcgcaggcgctggctcagtcaataaaggatccgggcccaacacgcacattcacagtagttcccagggcagcagaaagtactgaaatcccaccttatgtgatgaagtgtccgagcaatggtttgtgtagcaggcttcctgcagactgtatagactgcacaacaaatttctcctgtacctatgggaagcctgtcacttttgactgtgcagtgaaaccatctgttacctgtgttgatcaagacttcaaatcccaaaagaacttcatcattaacatgacttgcagattttgctggcagcttcctgaaacagattacgagtgtaccaactccaccagctgcatgacggtgtcctgtcctcggcagcgctaccctgccaactgcacggtgcgggaccacgtccactgcttgggtaaccgtacttttcccaaaatgctatattgcaat

SEQ ID NO: 5949 - DNA, 1425 bp, Homo Sapiens
ctggagccagagctgccaggctcggcgctgcgctctctctggagctcgctgtgtctggggcccgcgcctgcgcccccgggacccgtctcccccgagggccggttggcggcagcctgggacgcgcttatcgtgcggccagtccggcgctggcgccgcgtggcagtgggagtcaatgcatgtgttgatgtggtgctctcaggggtgaagctcttgcaggcacttggccttagtcctgggaatgggaaagatcacagcattctgcattcaaggaatgatctggaagaagccttcattcacttcatggggaagggagcagctgctgagcgcttcttcagtgataaggaaacttttcacgacattgcccaggttgcgtcagagttcccaggagcccagcactatgtaggaggaaatgcagctttaattggacagaaatttgcagccaactcagatttaaaggttcttctttgcggtccagttggtccaaagctacatgagcttcttgatgacaatgtctttgttccaccagagtcattgcaggaagtggatgagttccacctcattttagagtatcaagcaggggaggagtggggccagttaaaagctccccatgccaaccgattcatcttctctcacgacctctccaacggggccatgaatatgctggaggtgtttgtgtctagcctggaggagtttcagccagacctggtggtcctctctggattgcacatgatggagggacaaagcaaggagctccagaggaagagactcttggaggttgtaacctccatttctgacatccccactggtattccagttcacctagagctggccagtatgactaacagggagctcatgagcagcattgtccatcagcaggtctttcccgcggtgacttcccttgggctgaatgaacaggagctgttatttctcacccagtcagcctctggacctcactcttctctctcttcctggaacggtgttcctgatgtgggcatggtcagtgacatcctcttctggatcttgaaagaacatgggaggagtaaaagcagagcctcggatctcaccaggatccatttccacacgctggtctaccacatcctggcaactgtggatggacactgggccaaccagctggcagccgtggctgcaggagctcgtgtggctgggacacaggcctgcgccacagaaaccatagacaccagccgagtgtctctgagggcaccccaagagttcatgacttcccattcggaggcaggctccaggattgtattaaacccaaacaagccagtagtagaatggcacagagagggaatatccttccacttcacaccagtattggtgtgtaaagaccccattcgaactgtaggccttggagatgccatttcagccgaaggactcttctattcggaagtacaccctcactat

SEQ ID NO: 5950 - DNA, 1131 bp, Homo Sapiens
gaaataacaagtcttgatacagagaatatagatgaaattttaaacaatgctgatgttgctttagtaaatttttatgctgactggtgtcgtttcagtcagatgttgcatccaatttttgaggaagcttccgatgtcattaaggaagaatttccaaatgaaaatcaagtagtgtttgccagagttgattgtgatcagcactctgacatagcccagagatacaggataagcaaatacccaaccctcaaattgtttcgtaatgggatgatgatgaagagagaatacaggggtcagcgatcagtgaaagcattggcagattacatcaggcaacaaaaaagtgaccccattcaagaaattcgggacttagcagaaatcaccactcttgatcgcagcaaaagaaatatcattggatattttgagcaaaaggactcggacaactatagagtttttgaacgagtagcgaatattttgcatgatgactgtgcctttctttctgcatttggggatgtttcaaaaccggaaagatatagtggcgacaacataatctacaaaccaccagggcattctgctccggatatggtgtacttgggagctatgacaaattttgatgtgacttacaattggattcaagataaatgtgttcctcttgtccgagaaataacatttgaaaatggagaggaattgacagaagaaggactgccttttctcatactctttcacatgaaagaagatacagaaagtttagaaatattccagaatgaagtagctcggcaattaataagtgaaaaaggtacaataaactttttacatgccgattgtgacaaatttagacatcctcttctgcacatacagaaaactccagcagattgtcctgtaatcgctattgacagctttaggcatatgtatgtgtttggagacttcaaagatgtattaattcctggaaaactcaagcaattcgtatttgacttacattctggaaaactgcacagagaattccatcatggacctgacccaactgatacagccccaggagagcaagcccaagatgtagcaagcagtccacctgagagctccttccagaaactagcacccagtgaatataggtatactctattgagggatcgagatgagctt

SEQ ID NO: 5951 - DNA, 381 bp, Homo Sapiens
gctgatggctctgcggcagtggccaccagtgacttctgtgtggctcctgacaccttcatcctgaacgtcacggagggccagatcagcacagaggtgactcgctactacctgtattgcagccagagtggaagcagccccttccagcagaccctgaccaccttccagcgcgcacttaccaccatgcagatccaggtcgcggggctgctgcagtttgccgtgcccctcttctccactgcagaggaagacctgcttgcaatccagctcctgctgaactcctcagagtccagccttcaccagctgaccgccatggtggactgccgagggctgcacaaggattatctggacgctcttgctggcatctgctacgacggcctccagggc

SEQ ID NO: 5952 - DNA, 501 bp, Homo Sapiens
cacggcttccgtatccatgattatttgtactttcaagtgctgagtcctggggacattcgatacatcttcacagccacacctgccaaggactttggtggtatctttcacacaaggtatgagcagattcaccttgtccccgctgaacctccagaggcctgcggggaactcagcaacggtttcttcatccaggaccagattgctctggtggagagggggggctgctccttcctctccaagactcgggtggtccaggagcacggcgggcgggcggtgatcatctctgacaacgcagttgacaatgacagcttctacgtggagatgatccaggacagtacccagcgcacagctgacatccccgccctcttcctgctcggccgagacggctacatgatccgccgctctctggaacagcatgggctgccatgggccatcatttccatcccagtcaatgtcaccagcatccccacctttgagctgctgcaaccgccctggaccttctgg

SEQ ID NO: 5953 - DNA, 597 bp, Homo Sapiens
agccgcccactccaagccaggtcccagcaacaccatgggctggcagctgatctgggcaaaggcaagctgcacctggcaggaccttgttgtccctcagagatggacacaacagagacatcgggccctggaaaccatccagaacgctgtggagtgccgagccctgaatgcgaatccttcctggaacacctccaacgtgcccttcgcagtcgcttccgcctgcggctattgggggtacgccaggcacagccgctctgcgaggagctctgccaggcctggttcgccaactgcgaagatgatatcacctgcggcccgacttggctcccactctcagaaaaaaggggctgtgagcccagctgccttacctatggacagaccttcgcagacgggacggacctttgtcgctcggctctgggccacgccctaccggtggctgctcctggagcccgtcactgcttcaacatctccatctccgcggtacctcgtcccagaccaggacgacggggccgggaagctccctcccggcgttcccgcagccctcgcacctccatcctggacgctgcgggcagcgggagtggcagtggaagcggcagcggcccc

SEQ ID NO: 5954 - DNA, 1656 bp, Homo Sapiens
atgagtgataatccacccagaatggaagtgtgtccttactgtaagaagccatttaaacgattaaaatcccacttgccatactgtaagatgataggaccaaccatacctactgatcaaaaagtttatcagtccaagccagctacactcccacgtgctaaaaagatgaaaggaccaatcaaagatttaattaaagctaaagggaaagagttagagacagagaatgaagaaagaaattctaagttggtggtggacaaaccagaacagacagtgaagacctttccactgccagctgttggtttggaaagagcagctactacaaaggcagataaagacatcaagaatccaatccaaccatccttcaaaatgttaaaaaatactaaaccaatgactactttccaagaagaaaccaaggctcagttttacgcatcagagaaaacctctcctaaaagagaacttgccaaagatttgcctaaatcaggagaaagtcgatgtaatccttcagaagctggagcgtctttactggttggctcaatagaaccttctttgtcaaatcaagatagaaaatattcctcaactctacctaatgatgtacaaactacctctggtgatctcaaattggacaaaattgatccccaaagacaggaacttctagtaaaattactagatgtgcctactggtgattgtcatatttctccaaagaatgtcagtgatggggttaaaagggtaagaacattattaagcaatgagagagattccaaaggcagggatcacctctcaggagtccctactgatgttacagttactgagactccagaaaagaacacagaatccctcattttaagccttaaaatgagctcattaggtaaaatccaagtcatggagaaacaagagaaaggacttaccctgggagtagagacgtgtgggagcaaaggaaatgcagagaaaagtatgtctgcaacagaaaagcaggaacggactgtcatgagccatggctgtgagaacttcaacaccagggattcagtcacaggaaaggagtctcaaggggaaagaccacatttaagtttgttcattccgagggagacgacttaccagtttcattctgtatcgcagtcaagtagtcaaagtcttgcctctctagctacaacatttcttcaagaaaagaaagcagaagcccagaatcataattgtgtccctgatgtaaaggcattaatggagagtcccgagggacagttatctctggagcccaaatctgatagtcagttccaagcatcacacactgggtgccagagccctttatgttcagcccagcgtcacactcctcagagccccttcaccaatcatgctgcagctgctggcaggaagactcttcgcagctgcatggggctggagtggtttccagagctctatcctggttaccttggactaggggtgttgccagggaagcctcagtgttggaatgcaatgacccagaagccacaacttatcagtccccagggggaaagactctcacaagtttctttgttggaacgaagctcaactcatataaggagtttggaaccccctgccggacttacaacctccaacttctctctaatgaggctcttgggagctgtacaaaaaggctggatcaggtgcaacaccaccataaggaagagt

SEQ ID NO: 5955 - DNA, 231 bp, Homo Sapiens
acctccaactgggtgtgccagacgctggaggatgggcgcaggcgcagcgtggggctgtggaggtcctgctggctggtggacaggacccggggagggccgagccctggggccagagccggccaggtggacgcacatgactgtgaggcgctgggctggggctccgaggcagccggcttccaggagtcccgaggcaccgtcaaactgcagttcgacatgatgcgcgcctgcaac

SEQ ID NO: 5956 - DNA, 744 bp, Homo Sapiens
ggcccgagccaggccggagctgaggagaacgactgggttcgcctgcccagcaaatgcgaagtgtgtaaatatgttgctgtggagctgaagtcagcctttgaggaaaccggcaagaccaaggaggtgattggcacgggctatggcatcctggaccagaaggcctctggagtcaaatacaccaagtcggacttgcggttaatcgaagtcactgagaccatttgcaagaggctcctggattatagcctgcacaaggagaggaccggcagcaatcgatttgccaagggcatgtcagagacctttgagacattacacaacctggtacacaaaggggtcaaggtggtgatggacatcccctatgagctgtggaacgagacttctgcagaggtggctgacctcaagaagcagtgtgatgtgctggtggaagagtttgaggaggtgatcgaggactggtacaggaaccaccaggaggaagacctgactgaattcctctgcgccaaccacgtgctgaagggaaaagacaccagttgcctggcagagcagtggtccggcaagaagggagacacagctgccctgggagggaagaagtccaagaagaagagcagcagggccaaggcagcaggcggcaggagtagcagcagcaaacaaaggaaggagctgggtggccttgagggagaccccagccccgaggaggatgagggcatccagaaggcatcccctctcacacacagcccccctgatgagctc

SEQ ID NO: 5957 - DNA, 270 bp, Homo Sapiens
gctccgcagagactgttggagagaaggaactggactcctcaagctatgctctacctgaaaggggcacagggtcgccgcttcatctccgaccagagccggagaaaggacctctccgaccggccactgccggaaagacgaagcccaaatccccaactactaactattccggaggcagcaaccatcttactggcgtcccttcagaaatcaccagaagatgaagaaaaaaactttgatcaaaccagattcctggaagacagtctgcttaactgg

SEQ ID NO: 5958 - DNA, 1317 bp, Homo Sapiens
cacagcgccacgcgcttcgaccccacctgggagtccctggacgcccgccagctgcccgcgtggtttgaccaggccaagttcggcatcttcatccactggggagtgttttccgtgcccagcttcggtagcgagtggttctggtggtattggcaaaaggaaaagataccgaagtatgtggaatttatgaaagataattaccctcctagtttcaaatatgaagattttggaccactatttacagcaaaattttttaatgccaaccagtgggcagatatttttcaggcctctggtgccaaatacattgtcttaacttccaaacatcatgaaggctttaccttgtgggggtcagaatattcgtggaactggaatgccatagatgaggggcccaagagggacattgtcaaggaacttgaggtagccattaggaacagaactgacctgcgttttggactgtactattccctttttgaatggtttcatccgctcttccttgaggatgaatccagttcattccataagcggcaatttccagtttctaagacattgccagagctctatgagttagtgaacaactatcagcctgaggttctgtggtcggatggtgacggaggagcaccggatcaatactggaacagcacaggcttcttggcctggttatataatgaaagcccagttcggggcacagtagtcaccaatgatcgttggggagctggtagcatctgtaagcatggtggcttctatacctgcagtgatcgttataacccaggacatcttttgccacataaatgggaaaactgcatgacaatagacaaactgtcctggggctataggagggaagctggaatctctgactatcttacaattgaagaattggtgaagcaacttgtagagacagtttcatgtggaggaaatcttttgatgaatattgggcccacactagatggcaccatttctgtagtttttgaggagcgactgaggcaagtggggtcctggctaaaagtcaatggagaagctatttatgaaacctatacctggcgatcccagaatgacactgtcaccccagatgtgtggtacacatccaagcctaaagaaaaattagtctatgccatttttcttaaatggcccacatcaggacagctgttccttggccatcccaaagctattctgggggcaacagaggtgaaactactgggccatggacagccacttaactggatttctttggagcaaaatggcattatggtagaactgccacagctaaccattcatcagatgccgtgtaaatggggctgggctctagccctaactaatgtgatc

SEQ ID NO: 5959 - DNA, 1287 bp, Homo Sapiens
gagcaagtaaaacattcagagacatattgcatgtttcaagacaagaagtacagagtgggtgagagatggcatccttacctggaaccttatgggttggtttactgcgtgaactgcatctgctcagagaatgggaatgtgctttgcagccgagtcagatgtccaaatgttcattgcctttctcctgtgcatattcctcatctgtgctgccctcgctgcccagactccttacccccagtgaacaataaggtgaccagcaagtcttgcgagtacaatgggacaacttaccaacatggagagctgttcgtagctgaagggctctttcagaatcggcaacccaatcaatgcacccagtgcagctgttcggagggaaacgtgtattgtggtctcaagacttgccccaaattaacctgtgccttcccagtctctgttccagattcctgctgccgggtatgcagaggagatggagaactgtcatgggaacattctgatggtgatatcttccggcaacctgccaacagagaagcaagacattcttaccaccgctctcactatgatcctccaccaagccgacaggctggaggtctgtcccgctttcctggggccagaagtcaccggggagctcttatggattcccagcaagcatcaggaaccattgtgcaaattgtcatcaataacaaacacaagcatggacaagtgtgtgtttccaatggaaagacctattctcatggcgagtcctggcacccaaacctccgggcatttggcattgtggagtgtgtgctatgtacttgtaatgtcaccaagcaagagtgtaagaaaatccactgccccaatcgatacccctgcaagtatcctcaaaaaatagacggaaaatgctgcaaggtgtgtccaggtaaaaaagcaaaagaacttccaggccaaagctttgacaataaaggctacttctgcggggaagaaacgatgcctgtgtatgagtctgtattcatggaggatggggagacaaccagaaaaatagcactggagactgagagaccacctcaggtagaggtccacgtttggactattcgaaagggcattctccagcacttccatattgagaagatctccaagaggatgtttgaggagcttcctcacttcaagctggtgaccagaacaaccctgagccagtggaagatcttcaccgaaggagaagctcagatcagccagatgtgttcaagtcgtgtatgcagaacagagcttgaagatttagtcaaggttttgtacctggagagatctgaaaagggccactgt

SEQ ID NO: 5960 - DNA, 246 bp, Homo Sapiens
aaaaaggactcacctcccaaaaattccgtgaaggttgatgagctttcactctactcagttcctgagggtcaatcgaagtatgtggaggaggcaaggagccagcttgaagaaagcatctcacagctccgacactattgcgagccatacacaacctggtgtcaggaaacgtactcccaaactaagcccaagatgcaaagtttggttcaatgggggttagacagctatgactatctccaaaatgcacct

SEQ ID NO: 5961 - DNA, 1671 bp, Homo Sapiens
gcgccaggtcccgacggctccgcgccagatcccgcccactacagggagcgagtcaaggccatgttctaccacgcctacgacagctacctggagaatgcctttcccttcgatgagctgcgacctctcacctgtgacgggcacgacacctggggcagtttttctctgactctaattgatgcactggacaccttgctgattttggggaatgtctcagaattccaaagagtggttgaagtgctccaggacagcgtggactttgatattgatgtgaacgcctctgtgtttgaaacaaacattcgagtggtaggaggactcctgtctgctcatctgctctccaagaaggctggggtggaagtagaggctggatggccctgttccgggcctctcctgagaatggctgaggaggcggcccgaaaactcctcccagcctttcagacccccactggcatgccatatggaacagtgaacttacttcatggcgtgaacccaggagagacccctgtcacctgtacggcagggattgggaccttcattgttgaatttgccaccctgagcagcctcactggtgacccggtgttcgaagatgtggccagagtggctttgatgcgcctctgggagagccggtcagatatcgggctggtcggcaaccacattgatgtgctcactggcaagtgggtggcccaggacgcaggcatcggggctggcgtggactcctactttgagtacttggtgaaaggagccatcctgcttcaggataagaagctcatggccatgttcctagagtataacaaagccatccggaactacacccgcttcgatgactggtacctgtgggttcagatgtacaaggggactgtgtccatgccagtcttccagtccttggaggcctactggcctggtcttcagagcctcattggagacattgacaatgccatgaggaccttcctcaactactacactgtatggaagcagtttggggggctcccggaattctacaacattcctcagggatacacagtggagaagcgagagggctacccacttcggccagaacttattgaaagcgcaatgtacctctaccgtgccacgggggatcccaccctcctagaactcggaagagatgctgtggaatccattgaaaaaatcagcaaggtggagtgcggatttgcaacaatcaaagatctgcgagaccacaagctggacaaccgcatggagtcgttcttcctggccgagactgtgaaatacctctacctcctgtttgacccaaccaacttcatccacaacaatgggtccaccttcgacacggtgatcaccccctatggggagtgcatcctgggggctggggggtacatcttcaacacagaagctcaccccatcgaccctgccgccctgcactgctgccagaggctgaaggaagagcagtgggaggtggaggacttgatgagggaattctactctctcaaacggagcaggtcgaaatttcagaaaaacactgttagttcggggccatgggaacctccagcaaggccaggaacactcttctcaccagaaaaccatgaccaggcaagggagaggaagcctgccaaacagaaggtcccacttctcagctgccccagtcagcccttcacctccaagttggcattactgggacaggttttcctagactcctca

SEQ ID NO: 5962 - DNA, 1122 bp, Homo Sapiens
accctgtcaaagtcagatgccaaaaaagccgcctcaaagacgctgctggagaagagtcagttttcagataagccggtgcaagaccggggtttggtggtgacggacctcaaagctgagagtgtggttcttgagcatcgcagctactgctcggcaaaggcccgggacagacactttgctggggatgtactgggctatgtcactccatggaacagccatggctacgatgtcaccaaggtctttgggagcaagttcacacagatctcacccgtctggctgcagctgaagagacgtggccgtgagatgtttgaggtcacgggcctccacgacgtggaccaagggtggatgcgagctgtcaggaagcatgccaagggcctgcacatagtgcctcggctcctgtttgaggactggacttacgatgatttccggaacgtcttagacagtgaggatgagatagaggagctgagcaagaccgtggtccaggtggcaaagaaccagcatttcgatggcttcgtggtggaggtctggaaccagctgctaagccagaagcgcgtgggcctcatccacatgctcacccacttggccgaggctctgcaccaggcccggctgctggccctcctggtcatcccgcctgccatcacccccgggaccgaccagctgggcatgttcacgcacaaggagtttgagcagctggcccccgtgctggatggtttcagcctcatgacctacgactactctacagcgcatcagcctggccctaatgcacccctgtcctgggttcgagcctgcgtccaggtcctggacccgaagtccaagtggcgaagcaaaatcctcctggggctcaacttctatggtatggactacgcgacctccaaggatgcccgtgagcctgttgtcggggccaggtacatccagacactgaaggaccacaggccccggatggtgtgggacagccaggcctcagagcacttcttcgagtacaagaagagccgcagtgggaggcacgtcgtcttctacccaaccctgaagtccctgcaggtgcggctggagctggcccgggagctgggcgttggggtctctatctgggagctgggccagggcctggactacttctacgacctgctc

SEQ ID NO: 5963 - DNA, 327 bp, Homo Sapiens
caaaatgcgaccgctgagcctgagctcacatccgctggcgccgcccagccggagggccccgggggtgctgcgagctgggaatatggcgacccccactctccggtcatcctctgctcttacctacctgatgaatttatagaatgtgaagacccagtggatcatgttggaaatgcaactgcatcccaggaacttggttatggttgtctcaagttcggcggtcaggcctacagcgacgtggaacacacttcagtccagtgccatgccttagatggaattgagtgtgccagtcctaggacctttctacgagaaaataaaccttgtataaag

SEQ ID NO: 5964 - DNA, 243 bp, Homo Sapiens
acctccgccgggggcgaggagtcgcttaagtgcgaggacctcaaagtgggacaatatatttgtaaagatccaaaaataaatgacgctacgcaagaaccagttaactgtacaaactacacagctcatgtttcctgttttccagcacccaacataacttgtaaggattccagtggcaatgaaacacattttactgggaacgaagttggttttttcaagcccatatcttgccgaaatgtaaatggc

SEQ ID NO: 5965 - DNA, 528 bp, Homo Sapiens
cagagcgacacgagccctgacacggaggagtcctattcagactggggccttcggcacctccggggaagctttgaatccgtcaatagctacttcgattcttttctggagctgctgggagggaagaatggagtctgtcagtacaggtgccgatatggaaaggcaccaatgcccagacctggctacaagccccaagagcccaatggctgcggctcctatttcctgggtctcaaggtaccagaaagtatggacttgggcattccagcaatgacaaagtgctgcaaccagctggatgtctgttatgacacttgcggtgccaacaaatatcgctgtgatgcaaaattccgatggtgtctccactcgatctgctctgaccttaagcggagtctgggctttgtctccaaagtggaagcagcctgtgattccctggttgacactgtgttcaacaccgtgtggaccttgggctgccgcccctttatgaatagtcagcgggcagcttgcatctgtgcagaggaggagaaggaagagtta

SEQ ID NO: 5966 - DNA, 1182 bp, Homo Sapiens
tatggcaacgtgcacgtgagcacagagtccaacctgcaggccaccgagcgccgagccgagggcctatacagtcagctcctagggctcacggcctcccagtccaacttgaccaaggagctcaacttcaccacccgcgccaaggatgccatcatgcagatgtggctgaatgctcgccgcgacctggaccgcatcaatgccagcttccgccagtgccagggtgaccgggtcatctacacgaacaatcagaggtacatggctgccatcatcttgagtgagaagcaatgcagagatcaattcaaggacatgaacaagagctgcgatgccttgctcttcatgctgaatcagaaggtgaagacgctggaggtggagatagccaaggagaagaccatttgcactaaggataaggaaagcgtgctgctgaacaaacgcgtggcggaggaacagctggttgaatgcgtgaaaacccgggagctgcagcaccaagagcgccagctggccaaggagcaactgcaaaaggtgcaagccctctgcctgcccctggacaaggacaagtttgagatggaccttcgtaacctgtggagggactccattatcccacgcagcctggacaacctgggttacaacctctaccatcccctgggctcggaattggcctccatccgcagagcctgcgaccacatgcccagcctcatgagctccaaggtggaggagctggcccggagcctccgggcggatatcgaacgcgtggcccgcgagaactcagacctccaacgccagaagctggaagcccagcagggcctgcgggccagtcaggaggcgaaacagaaggtggagaaggaggctcaggcccgggaggccaagctccaagctgaatgctcccggcagacccagctagcgctggaggagaaggcggtgctgcggaaggaacgagacaacctggccaaggagctggaagagaagaagagggaggcggagcagctcaggatggagctggccatcagaaactcagccctggacacctgcatcaagaccaagtcgcagccgatgatgccagtgtcaaggcccatgggccctgtccccaacccccagcccatcgacccagctagcctggaggagttcaagaggaagatcctggagtcccagaggccccctgcaggcatccctgtagccccatccagtggc

SEQ ID NO: 5967 - DNA, 696 bp, Homo Sapiens
acctttgacagagctgtggccagcggctgccaacggtgctgtgactctgaggaccccctggatcctgcccatgtatcctcagcctcttcctccggccgcccccacgccctgcctgagatcagaccctacattaatatcaccatcctgaagggtgacaaaggggacccaggcccaatgggcctgccagggtacatgggcagggagggtccccaaggggagcctggccctcagggcagcaagggtgacaagggggagatgggcagccccggcgccccgtgccagaagcgcttcttcgccttctcagtgggccgcaagacggccctgcacagcggcgaggacttccagacactgctcttcgaaagggtctttgtgaaccttgatgggtgctttgacatggcgaccggccagtttgctgctcccctgcgtggcatctacttcttcagcctcaatgtgcacagctggaattacaaggagacgtacgtgcacattatgcataaccagaaagaggctgtcatcctgtacgcgcagcccagcgagcgcagcatcatgcagagccagagtgtgatgctggacctggcctacggggaccgcgtctgggtgcggctcttcaagcgccagcgcgagaacgccatctacagcaacgacttcgacacctacatcaccttcagcggccacctcatcaaggccgaggacgac

SEQ ID NO: 5968 - DNA, 768 bp, Homo Sapiens
cgtgtgccccatgtccagggggaacagcaggagtgggaggggactgaggagctgccgtcgcctccggaccatgccgagagggctgaagaacaacatgaaaaatacaggcccagtcaggaccaggggctccctgcttcccggtgcttgcgctgctgtgaccccggtacctccatgtacccggcgaccgccgtgccccagatcaacatcactatcttgaaaggggagaagggtgaccgcggagatcgaggcctccaagggaaatatggcaaaacaggctcagcaggggccaggggccacactggacccaaagggcagaagggctccatgggggcccctggggagcggtgcaagagccactacgccgccttttcggtgggccggaagaagcccatgcacagcaaccactactaccagacggtgatcttcgacacggagttcgtgaacctctacgaccacttcaacatgttcaccggcaagttctactgctacgtgcccggcctctacttcttcagcctcaacgtgcacacctggaaccagaaggagacctacctgcacatcatgaagaacgaggaggaggtggtgatcttgttcgcgcaggtgggcgaccgcagcatcatgcaaagccagagcctgatgctggagctgcgagagcaggaccaggtgtgggtacgcctctacaagggcgaacgtgagaacgccatcttcagcgaggagctggacacctacatcaccttcagtggctacctggtcaagcacgccaccgagccc

SEQ ID NO: 5969 - DNA, 819 bp, Homo Sapiens
caaccccggggtaatcagttgaaaggagagaactactcccccaggtatatctgcagcattcctggcttgcctggacctccagggccccctggagcaaatggttcccctgggccccatggtcgcatcggccttccaggaagagatggtagagacggcaggaaaggagagaaaggtgaaaagggaactgcaggtttgagaggtaagactggaccgctaggtcttgccggtgagaaaggggaccaaggagagactgggaagaaaggacccataggaccagagggagagaaaggagaagtaggtccaattggtcctcctggaccaaagggagacagaggagaacaaggggacccggggctgcctggagtttgcagatgtggaagcatcgtgctcaaatccgccttttctgttggcatcacaaccagctacccagaagaaagactacctattatatttaacaaggtcctcttcaacgagggagagcactacaaccctgccacagggaagttcatctgtgctttcccagggatctattacttttcttatgatatcacattggctaataagcatctggcaatcggactggtacacaatgggcaataccggataaagaccttcgacgccaacacaggaaaccatgatgtggcttcggggtccacagtcatctatctgcagccagaagatgaagtctggctggagattttcttcacagaccagaatggcctcttctcagacccaggttgggcagacagcttattctccgggtttctcttatacgttgacacagattacctagattccatatcagaagatgatgaattg

SEQ ID NO: 5970 - DNA, 891 bp, Homo Sapiens
caagatgaatacatggaggtgagcggaagaactaataaagtggtggcaagaatagtgcaaagccaccagcagactggccgtagcggctccaggagggagaaagtgagagagcggagccatcctaaaactgggactgtggataataacacttctacagacctaaaatccctgagaccagatgagctaccgcaccccgaggtagatgacctagcccagatcaccacattctggggccagtctccacaaaccggaggactacccccagactgcagtaagtgttgtcatggagactacagctttcgaggctaccaaggcccccctgggccaccgggccctcctggcattccaggaaaccatggaaacaatggcaacaatggagccactggtcatgaaggagccaaaggtgagaagggcgacaaaggtgacctggggcctcgaggggagcgggggcagcatggccccaaaggagagaagggctacccggggattccaccagaacttcagattgcattcatggcttctctggcaacccacttcagcaatcagaacagtgggattatcttcagcagtgttgagaccaacattggaaacttctttgatgtcatgactggtagatttggggccccagtatcaggtgtgtatttcttcaccttcagcatgatgaagcatgaggatgttgaggaagtgtatgtgtaccttatgcacaatggcaacacagtcttcagcatgtacagctatgaaatgaagggcaaatcagatacatccagcaatcatgctgtgctgaagctagccaaaggggatgaggtttggctgcgaatgggcaatggcgctctccatggggaccaccaacgcttctccacctttgcaggattcctgctctttgaaactaag

SEQ ID NO: 5971 - DNA, 1653 bp, Homo Sapiens
gaaggaacactttgtgattttccaaaaatacaccatggatttctgtatgatgaagaagattataaccctttttcccaagttcctacaggggaagttttctattactcctgtgaatataattttgtgtctccttcaaaatccttttggactcgcataacatgcacagaagaaggatggtcaccaacaccgaagtgtctcagaatgtgttcctttccttttgtgaaaaatggtcattctgaatcttcaggactaatacatctggaaggtgatactgtacaaattatttgcaacacaggatacagccttcaaaacaatgagaaaaacatttcgtgtgtagaacggggctggtccactcctcccatatgcagcttcactaaaggagaatgtcatgttccaattttagaagccaatgtagatgctcagccaaaaaaagaaagctacaaagttggagacgtgttgaaattctcctgcagaaaaaatcttataagagttggatcagactcagttcaatgttaccaatttgggtggtcacctaactttccaacatgcaaaggacaagtacgatcatgtggtccacctcctcaactctccaatggtgaagttaaggagataagaaaagaggaatatggacacaatgaagtagtggaatatgattgcaatcctaattttataataaacgggcctaagaaaatacaatgtgtggatggagaatggacaactttacccacttgtgttgaacaagtgaaaacatgtggatacatacctgaactcgagtacggttatgttcagccgtctgtccctccctatcaacatggagtttcagtcgaggtgaattgcagaaatgaatatgcaatgattggaaataacatgattacctgtattaatggaatatggacagagcttcctatgtgtgttgcaacacaccaacttaagaggtgcaaaatagcaggagttaatataaaaacattactcaagctatctgggaaagaatttaatcataattctagaatacgttacagatgttcagacatcttcagatacaggcactcagtctgtataaacgggaaatggaatcctgaagtagactgcacagaaaaaagggaacaattctgcccaccgccacctcagatacctaatgctcagaatatgacaaccacagtgaattatcaggatggagaaaaagtagctgttctctgtaaagaaaactatctacttccagaagcaaaagaaattgtatgtaaagatggacgatggcaatcattaccacgctgtgttgagtctactgcatattgtgggccccctccatctattaacaatggagataccacctcattcccattatcagtatatcctccagggtcaacagtgacgtaccgttgccagtccttctataaactccagggctctgtaactgtaacatgcagaaataaacagtggtcagaaccaccaagatgcctagatccatgtgtggtatctgaagaaaacatgaacaaaaataacatacagttaaaatggagaaacgatggaaaactctatgcaaaaacaggggatgctgttgaattccagtgtaaattcccacataaagcgatgatatcatcaccaccatttcgagcaatctgtcaggaagggaaatttgaatatcctatatgtgaa

SEQ ID NO: 5972 - DNA, 612 bp, Homo Sapiens
gaagcatttgactcggtcttgggtgatacggcgtcttgccaccgggcctgtcagttgacctaccccttgcacacctaccctaaggaagaggagttgtacgcatgtcagagaggttgcaggctgttttcaatttgtcagtttgtggatgatggaattgacttaaatcgaactaaattggaatgtgaatctgcatgtacagaagcatattcccaatctgatgagcaatatgcttgccatcttggttgccagaatcagctgccattcgctgaactgagacaagaacaacttatgtccctgatgccaaaaatgcacctactctttcctctaactctggtgaggtcattctggagtgacatgatggactccgcacagagcttcataacctcttcatggactttttatcttcaagccgatgacggaaaaatagttatattccagtctaagccagaaatccagtacgcaccacatttggagcaggagcctacaaatttgagagaatcatctctaagcaaaatgtcctcagatctgcaaatgagaaattcacaagcgcacaggaattttcttgaagatggagaaagtgatggctttttaagatgcctctctcttaactct

SEQ ID NO: 5973 - DNA, 753 bp, Homo Sapiens
caaaacgcctcccggggaaggcgccagcgaagaatgcatcctaacgttagtcaaggctgccaaggaggctgtgcaacatgctcagattacaatggatgtttgtcatgtaagcccagactattttttgctctggaaagaattggcatgaagcagattggagtatgtctctcttcatgtccaagtggatattatggaactcgatatccagatataaataagtgtacaaaatgcaaagctgactgtgatacctgtttcaacaaaaatttctgcacaaaatgtaaaagtggattttacttacaccttggaaagtgccttgacaattgcccagaagggttggaagccaacaaccatactatggagtgtgtcagtattgtgcactgtgaggtcagtgaatggaatccttggagtccatgcacgaagaagggaaaaacatgtggcttcaaaagagggactgaaacacgggtccgagaaataatacagcatccttcagcaaagggtaacctgtgtcccccaacaaatgagacaagaaagtgtacagtgcaaaggaagaagtgtcagaagggagaacgaggaaaaaaaggaagggagaggaaaagaaaaaaacctaataaaggagaaagtaaagaagcaatacctgacagcaaaagtctggaatccagcaaagaaatcccagagcaacgagaaaacaaacagcagcagaagaagcgaaaagtccaagataaacagaaatcggtatcagtcagcactgtacac

SEQ ID NO: 5974 - DNA, 1143 bp, Homo Sapiens
cagttctggcagggccacacagggatcaggtacaaggagcagagggagagctgtcccaagcacgctgttcgctgtgacggggtggtggactgcaagctgaagagtgacgagctgggctgcgtgaggtttgactgggacaagtctctgcttaaaatctactctgggtcctcccatcagtggcttcccatctgtagcagcaactggaatgactcctactcagagaagacctgccagcagctgggtttcgagagtgctcaccggacaaccgaggttgcccacagggattttgccaacagcttctcaatcttgagatacaactccaccatccaggaaagcctccacaggtctgaatgcccttcccagcggtatatctccctccagtgttcccactgcggactgagggccatgaccgggcggatcgtgggaggggcgctggcctcggatagcaagtggccttggcaagtgagtctgcacttcggcaccacccacatctgtggaggcacgctcattgacgcccagtgggtgctcactgccgcccactgcttcttcgtgacccgggagaaggtcctggagggctggaaggtgtacgcgggcaccagcaacctgcaccagttgcctgaggcagcctccattgccgagatcatcatcaacagcaattacaccgatgaggaggacgactatgacatcgccctcatgcggctgtccaagcccctgaccctgtccgctcacatccaccctgcttgcctccccatgcatggacagacctttagcctcaatgagacctgctggatcacaggctttggcaagaccagggagacagatgacaagacatcccccttcctccgggaggtgcaggtcaatctcatcgacttcaagaaatgcaatgactacttggtctatgacagttaccttaccccaaggatgatgtgtgctggggaccttcgtgggggcagagactcctgccagggagacagcggggggcctcttgtctgtgagcagaacaaccgctggtacctggcaggtgtcaccagctggggcacaggctgtggccagagaaacaaacctggtgtgtacaccaaagtgacagaagttcttccctggatttacagcaagatggagagcgaggtgcgattcagaaaatcc

SEQ ID NO: 5975 - DNA, 3402 bp, Homo Sapiens
aacgtggccccgaagttcctagccaacatgacgtcagtgatcctgcctgaggacctgcctgtgggtgcccaggccttctggttggtagcggaagaccaggacaatgaccctctgacctatgggatgagcggccccaatgcctacttcttcgctgtcactccgaaaactggggaagtgaagctggccagcgctctggactacgagacactctacacattcaaagtcaccatctccgtgagcgacccctacatccaggtgcagagggagatgctggtgattgtggaagatagaaacgacaacgcacccgttttccagaacaccgctttctccaccagcatcaacgagaccctgcccgtgggcagtgtggtgttctccgtgctggccgtggataaagacatggggtctgcaggcatggtcgtgtactccatagagaaggtcatccctagcactggggacagcgagcatctcttccggatcctggccaatggctccatcgtcctcaatggcagcctcagctacaacaacaagagcgctttctaccagctggagctgaaggcctgtgacttgggcggcatgtaccacaacaccttcaccatccagtgctccctgcctgtcttcctgtccatctccgtggtggaccagcctgaccttgacccccagtttgtcagggagttttactcggcctctgtggctgaggatgcagccaagggaacctcggtgctgacggtggaggctgtggatggcgacaaaggcatcaatgaccctgtgatctacagcatctcctactccacgcggcccggctggtttgacatcggggcagatggggtgatcagggtcaacggctccctggaccgtgagcagctgctggaggcggatgaggaggtgcagctgcaggtcacggccaccgagacacacctcaacatctacgggcaggaggccaaggtgagcatctgggtgacagtgagagtgatggacgtcaatgaccacaaacctgagttttacaactgcagcctcccagcctgcaccttcacccccgaagaggcccaagtgaacttcactggctacgtggacgagcatgcctccccccgcatccccatcgatgacctcaccatggtggtctacgacccggacaagggcagcaatggcaccttcctgttgtcgctggggggccccgatgcagaagccttcagcgtctccccggagcgggcagcgggctcagcctccgttcaggtgctggtgagagtatccgcgctggtggactacgagaggcagacggcgatggcggtgcaggttgtggccacagactccgtcagccagaacttctccgtcgccatggtgaccatccaccttagagacattaatgaccacaggcccacgtttccccagagcttgtacgtcctcacggtgccagagcacagcgccaccggctctgtggtcaccgacagcatccacgccacggacccagacacgggcgcgtggggccaaattacctacagcctgctcccaggaaatggggcagacctcttccaagtggatcccgtctcagggacggtgacggtgaggaacggtgagctgctggaccgggagagccaggccgtgtactacctgacgctgcaggccacagatggcgggaacctgtcctcctccaccacactgcagatccacctgctggacatcaacgacaatgcacccgtggttagcggctcctacaacatcttcgtccaggaggaggagggcaatgtctccgtgaccatccaggcccacgacaatgatgagccgggcaccaacaacagccgtctgctcttcaacctgctgcctggcccctacagccacaacttctccttggaccctgacacagggctcctcagaaacctggggcccctggacagagaggccatcgaccccgccctggagggccgcattgtgctgacagtgcttgtgtctgactgcggcgagcctgtcctcggcaccaaagtcaatgtcaccatcactgtggaggacatcaatgataacctgcccatcttcaatcagtccagctacaactttacggtgaaggaggaggatccaggagtgctagtgggcgtggtgaaggcctgggacgcggaccagacggaagccaacaaccgcatcagcttcagcctgtcggggagtggtgccaactacttcatgatccgaggcttggtgctgggggctgggtgggctgagggctacctccggctgcccccggacgtgagcctggattacgagacacagcccgtcttcaacttgacagtgagtgctgagaacccagacccccaggggggtgagaccatagtagacgtctgcgtgaatgtgaaagacgtgaacgacaatccccccaccctggatgtagcctcactccggggcatccgtgtggctgagaatggctcacagcacggccaggtggctgtggtggttgcctcggatgtggacaccagtgcccagctggagatacagcttgtgaacattctctgcaccaaggccggggtcgatgtgggcagcctatgctggggctggttctcagtggcggccaacggctctgtgtacatcaaccagagcaaagccatcgactacgaggcctgtgacctggtcacgctggttgtgcgggcctgtgacctagccacggaccccggcttccaggcctacagcaacaatggaagcctcctcattaccattgaggacgtgaatgacaatgcaccctattttctgcctgagaataagacttttgtgatcatccctgaactcgtgctgcccaaccgggaggtggcttctgtccgggccagagacgatgattcagggaacaatggcgtcatcctgttctccatcctccgagtagacttcatctctaaggacggggccaccatccctttccagggtgtcttctcgatcttcacctcctccgaggccgacgtgttcgctgggagcattcagccggtgaccagcctcgactccactctccaaggcacctaccaagtgacagtccaggccagggacagaccttccttgggtcctttcctggaagccaccaccaccctgaatctcttcaccgtggaccagagttaccgctcgcggctgcagttctccacaccgaaggaggaggtgggcgccaacagacaggcgattaatgcggctcttacccaggcaaccaggactacagtatacattgtggacattcaggacatagattctgcagctcgggcccgacctcactcctacctcgatgcctactttgtcttccccaatgggtcagccctgacccttgatgagctgagtgtgatgatccggaatgatcaggactcgctgatgcagctgctgcagctggggctggtggtgctgggctcccaggagagccaggagtcagacctgtcgaaacagctcatcagt

SEQ ID NO: 5976 - DNA, 192 bp, Homo Sapiens
cttctgtataatagatttgatctggagctcttcactcccggcaacctagaaagagagtgcaatgaagaactttgcaattatgaggaagccagagagatttttgtggatgaagataaaacgattgcattttggcaggaatattcagctaaaggaccaaccacaaaatcagatggcaacagagagaaaatagat

SEQ ID NO: 5977 - DNA, 177 bp, Homo Sapiens
gccaatgagttcctggaggagctgcgccagggcaccatcgagcgagagtgcatggaggagatctgcagctacgaggaggtcaaggaagtgtttgagaacaaagagaaaacgatggagttctggaaagggtacccaaatgcagtctactctgtccgagacccctcgcagagctcagat

SEQ ID NO: 5978 - DNA, 1101 bp, Homo Sapiens
ctgccagaaggacccctggtgttcgtggctctggtattccgccatggcgaccgggccccgctggcctcctaccccatggacccacacaaggaggtggcctccaccctgtggccacgaggcctgggccagctgaccacggagggggtccgccagcagctggagctgggccgcttcctgaggagccgctacgaggccttcctgagtccggagtaccggcgggaggaggtgtacatccgcagcacggactttgaccgcacgctggagagtgcccaggccaaccttgccgggctgtttcccgaggctgctccagggagccccgaggcccgctggaggccgatcccggtgcacacggtgcccgtggctgaggataagctgctgaggttccccatgcgcagctgtccccgataccacgagctgctgcgggaggccaccgaggccgccgagtaccaggaggccctggagggctggacgggcttcctgagtcgcctggagaacttcacgggactgtcgctggttggagagccactgcgcagggcatggaaggttctggacaccctcatgtgccagcaagcccacggtcttccactaccagcctgggcctccccagatgtcctgcggactcttgcccagatctcggctttggatattggagcccacgtgggcccaccccgggcagcagagaaggcccagctgacaggggggatcctgctgaatgctatccttgcaaacttctcccgggtccagcgcctggggctgcccctcaagatggtcatgtactcagctcatgacagcaccctgctggccctccagggggccctgggcctctatgatggacacaccccgccatatgctgcctgcctcggctttgagttccggaagcacctggggaatcccgccaaagatggagggaatgtcaccgtctccctcttctaccgcaatgactccgcccacctgcccctgcctctcagcctccccgggtgcccggccccctgtccactaggccgcttctaccagctgactgccccggcccggcctcccgcccatggggtctcctgccatggcccctatgaggctgccatccccccagctccagtggtgccc

SEQ ID NO: 5979 - DNA, 501 bp, Homo Sapiens
caggagcaggcccagaccaccgactggagagccaccctgaagaccatccggaacggcgttcataagatagacacgtacctgaacgccgccttggacctcctgggaggcgaggacggtctctgccagtataaatgcagtgacggatctaagcctttcccacgttatggttataaaccctccccaccgaatggatgtggctctccactgtttggtgttcatcttaacattggtatcccttccctgacaaagtgttgcaaccaacacgacaggtgctatgagacctgtggcaaaagcaagaatgactgtgatgaagaattccagtattgcctctccaagatctgccgagatgtacagaaaacactaggactaactcagcatgttcaggcatgtgaaacaacagtggagctcttgtttgacagtgttatacatttaggttgtaaaccatatctggacagccaacgagccgcatgcaggtgtcattatgaagaaaaaactgatctt

SEQ ID NO: 5980 - DNA, 444 bp, Homo Sapiens
agcctgctcaacctgaaggccatggtggaggccgtcacagggaggagcgccatcctgtccttcgtgggctacggttgctactgtgggctggggggccgtggccagcccaaggatgaggtggactggtgctgccacgcccacgactgctgctaccaggaactctttgaccaaggctgtcacccctatgtggaccactatgatcacaccatcgagaacaacactgagatagtctgcagtgacctcaacaagacagagtgtgacaagcagacatgcatgtgtgacaagaacatggttctgtgcctcatgaaccagacgtaccgagaggagtaccgtggcttcctcaatgtctactgccagggccccacgcccaactgcagcatctatgaaccgccccctgaggaggtcacctgcagtcaccaatccccagcgccccccgcccctccc

SEQ ID NO: 5981 - DNA, 573 bp, Homo Sapiens
aggcgagacgaccctcactctctttgctatgacatcaccgtcatccctaagttcagacctggaccacggtggtgtgcggttcaaggccaggtggatgaaaagacttttcttcactatgactgtggcaacaagacagtcacacccgtcagtcccctggggaagaaactaaatgtcacaatggcctggaaagcacagaacccagtactgagagaggtggtggacatacttacagagcaactgcttgacattcagctggagaattacacacccaaggaacccctcaccctgcaggcaaggatgtcttgtgagcagaaagctgaaggacacagcagtggatcttggcagttcagtatcgatggacagaccttcctactctttgactcagagaagagaatgtggacaacggttcatcctggagccagaaagatgaaagaaaagtgggagaatgacaaggatgtggccatgtccttccattacatctcaatgggagactgcataggatggcttgaggacttcttgatgggcatggacagcaccctggagccaagtgcaggagcaccactcgccatgtcc

SEQ ID NO: 5982 - DNA, 573 bp, Homo Sapiens
ggatgggtcgacacacactgtctttgctatgacttcatcatcactcctaagtccagacctgaaccacagtggtgtgaagttcaaggcctggtggatgaaaggccttttcttcactatgactgtgttaaccacaaggccaaagcctttgcttctctggggaagaaagtcaatgtcacaaaaacctgggaagaacaaactgaaacactaagagacgtggtggatttccttaaagggcaactgcttgacattcaagtggagaatttaatacccattgagcccctcaccctgcaggccaggatgtcttgtgagcatgaagcccatggacacggcagaggatcttggcagttcctcttcaatggacagaagttcctcctctttgactcaaacaacagaaagtggacagcacttcatcctggagccaagaagatgacagagaagtgggagaagaacagggatgtgaccatgttcttccagaagatttcactgggggattgtaagatgtggcttgaagaatttttgatgtactgggaacaaatgctggatccaacaaaaccaccctctctggccccaggc

SEQ ID NO: 5983 - DNA, 2250 bp, Homo Sapiens
gtctcagccacggcggctgctgtggtccccgagcagcatgcctccgtagctggccagcatcccctggactggctgctcacagaccggggccccttccaccgcgctcaggagtatgctgacttcatggagcggtaccgccagggtttcaccaccaggtacaggatttatagggagtttgcccgttggaaggtgaacaacttggctctggaaaggaaggacttcttcagtttgccattgcctcttgccccagagtttatccggaacattcgcctccttggaaggagacccaatctgcaacaggttacagaaaatctgattaaaaagtacggcactcatttcttactttctgccacccttggaggagaagagtccctgaccatttttgtggacaagcagaaactgggaagaaagacagagacaacaggaggtgcctctataatcgggggcagtgggaacagcacagctgtgtccctggagaccctgcaccagctggccgcctcctacttcatcgacagagagagcacgctgcgacggctgcaccatatccagatagccacgggggccatcaaggtcaccgagaccaggaccggtcctctgggctgcagcaactatgacaatctggactcagtcagttctgtcttggtacagagtccagagaacaaagtacagttacttggccttcaggtgctgctgcctgagtatctgcgtgagcgctttgtagctgcagcactcagctacatcacatgcagctctgagggtgagctcgtctgcaaggagaatgactgctggtgcaagtgcagccccaccttccctgaatgcaactgccctgatgctgacatccaggccatggaggacagcctgctgcagatccaggactcctgggccactcacaaccggcagtttgaagagtcagaagagttccaggccctgctgaaaaggctgcccgatgaccggttcctgaactccacagctatctcccagttctgggccatggacaccagccttcagcaccgctaccagcagctgggagctggcttgaaagtgctgttcaaaaagacccatcggatcctacgccggctcttcaacctctgcaagcgctgccatcgccagcctcgcttccgcctgcccaaggagaggtccttgtcctactggtggaaccgaatccagtccctcctctactgtggggaaagcacctttcctggcactttcctggaacagagccacagctgcacctgcccctatgaccaatcttcctgccagggccccatcccatgtgccttgggcgaagggcccgcgtgtgcccactgtgctccagacaatagcacacgctgtgggagctgcaacccgggctatgtgctggcccaggggctgtgccggccagaggtggccgagtccctggaaaactttcttgggctggagacagacttgcaggacctggagctaaagtacctgctgcagaagcaggatagccgcattgaggtacactccatcttcatcagcaatgacatgcggctgggcagctggtttgacccttcctggaggaagcgcatgctgctcaccctgaagagcaacaagtacaagcctgggctggtgcacgtgatgttggccttgtccttgcagatctgtctcaccaagaacagcaccctggagcctgtcatggccatctacgtcaacccctttgggggcagccactctgagagctggttcatgcctgtgaatgagggcagctttcctgactgggaaaggactaacgtggatgcagctgcccagtgccaaaactggactatcaccttggggaataggtggaagactttctttgagacagttcatgtttacctacggagccgaatcaagtccctggatgacagctccaatgagacaatctactatgagcccctggagatgactgatccctctaagaatttgggttacatgaaaattaacaccttgcaggtctttggctacagcctgccctttgacccagatgctatccgggacttaattctccagttggactacccatatactcaaggttcccaggactctgcactcttgcagctcattgagctcagggaccgggtgaaccagctttctccacctggcaaagtccgacttgaccttttctcctgcttgctccggcatcggcttaagctggccaacaatgaggtgggcaggatccagtcctccctgagggctttcaattctaagctgccaaaccctgtggaatatgagaccggcaaactctgtagc

SEQ ID NO: 5984 - DNA, 387 bp, Homo Sapiens
ggcttggagctggctgtgtccgtgggctccagcgacttctgtgtggaccctgacgcctacgtgaccaaaatggtggaggagtactcggtgctgagtggggacatcctgcagtactacctggcctgctcgccccgcgccgccaaccccttccagcagaagctgtcgggcagccacaaggcactggtggagatgcaggatgtcgtggctgagcttctgaggaccgtcccctgggagcagccggccactaaggaccccctcctccgcgtccaggaggtgctgaatggcacggaggtgaacctgcagcacctcaccgccctggtggactgccgcagcctgcatctggactacgtgcaagcgctgaccggcttctgctatgacggcgtggag

SEQ ID NO: 5985 - DNA, 270 bp, Homo Sapiens
gaaagaatgctaaagatgttattaaagacatatggtcagaatggtcatacccactttggaaatgataactttggtcctcaagaaaaaactcatcaacctaaagcattacctgccatcaatggtgtgacatgctatgcaaatcctgctgtcacagaagctaatggacatatccattttgataatgtcagtgtggtatctctacaggatggaaaaaaagagccaagttcatgtacctgtttgaaggggcccaaactgtcagaaatagggacg

SEQ ID NO: 5986 - DNA, 1338 bp, Homo Sapiens
gcccagcagggtcgtgggcgccgggagctagcaccgggtctgcacctgcggggcatccgggacgcgggaggccggtactgccaggagcaggacctgtgctgccgcggccgtgccgacgactgtgccctgccctacctgggcgccatctgttactgtgacctcttctgcaaccgcacggtctccgactgctgccctgacttctgggacttctgcctcggcgtgccacccccttttcccccgatccaaggatgtatgcatggaggtcgtatctatccagtcttgggaacgtactgggacaactgtaaccgttgcacctgccaggagaacaggcagtggcagtgtgaccaagaaccatgcctggtggatccagacatgatcaaagccatcaaccagggcaactatggctggcaggctgggaaccacagcgccttctggggcatgaccctggatgagggcattcgctaccgcctgggcaccatccgcccatcttcctcggtcatgaacatgcatgaaatttatacagtgctgaacccaggggaggtgcttcccacagccttcgaggcctctgagaagtggcccaacctgattcatgagcctcttgaccaaggcaactgtgcaggctcctgggccttctccacagcagctgtggcatccgatcgtgtctcaatccattctctgggacacatgacgcctgtcctgtcgccccagaacctgctgtcttgtgacacccaccagcagcagggctgccgcggtgggcgtctcgatggtgcctggtggttcctgcgtcgccgaggggtggtgtctgaccactgctaccccttctcgggccgtgaacgagacgaggctggccctgcgcccccctgtatgatgcacagccgagccatgggtcggggcaagcgccaggccactgcccactgccccaacagctatgttaataacaatgacatctaccaggtcactcctgtctaccgcctcggctccaacgacaaggagatcatgaaggagctgatggagaatggccctgtccaagccctcatggaggtgcatgaggacttcttcctatacaagggaggcatctacagccacacgccagtgagccttgggaggccagagagataccgccggcatgggacccactcagtcaagatcacaggatggggagaggagacgctgccagatggaaggacgctcaaatactggactgcggccaactcctggggcccagcctggggcgagaggggccacttccgcatcgtgcgcggcgtcaatgagtgcgacatcgagagcttcgtgctgggcgtctggggccgcgtgggcatggaggacatgggtcatcac

SEQ ID NO: 5987 - DNA, 855 bp, Homo Sapiens
gccaggatacctgttcccccagcctgtgggaagccccagcagctgaaccgggttgtgggcggcgaggacagcactgacagcgagtggccctggatcgtgagcatccagaagaatgggacccaccactgcgcaggttctctgctcaccagccgctgggtgatcactgctgcccactgtttcaaggacaacctgaacaaaccatacctgttctctgtgctgctgggggcctggcagctggggaaccctggctctcggtcccagaaggtgggtgttgcctgggtggagccccaccctgtgtattcctggaaggaaggtgcctgtgcagacattgccctggtgcgtctcgagcgctccatacagttctcagagcgggtcctgcccatctgcctacctgatgcctctatccacctccctccaaacacccactgctggatctcaggctgggggagcatccaagatggagttcccttgccccaccctcagaccctgcagaagctgaaggttcctatcatcgactcggaagtctgcagccatctgtactggcggggagcaggacagggacccatcactgaggacatgctgtgtgccggctacttggagggggagcgggatgcttgtctgggcgactccgggggccccctcatgtgccaggtggacggcgcctggctgctggccggcatcatcagctggggcgagggctgtgccgagcgcaacaggcccggggtctacatcagcctctctgcgcaccgctcctgggtggagaagatcgtgcaaggggtgcagctccgcgggcgcgctcaggggggtggggccctcagggcaccgagccagggctctggggccgccgcgcgctcc

SEQ ID NO: 5988 - DNA, 1146 bp, Homo Sapiens
atgcccaggtcagcacccaatgacattctggacctccgcctccccccggagcccgtgctcaatgccaacacagtgtgcctaacattgccaggcctgagccggcggcagatggaggtgtgtgtgcgtcaccctgatgtggctgcctcagccatacagggcatccagatcgccatccacgaatgccaacaccaattcagggaccagcgctggaactgctcaagcctggagactcgcaacaagatcccctatgagagtcccatcttcagcagaggtttccgagagagcgcttttgcctacgccatcgcagcagctggcgtggtgcacgccgtgtccaatgcgtgtgccctgggcaaactgaaggcctgtggctgtgatgcgtcccggcgaggggacgaggaggccttccgtaggaagctgcaccgcttacaactggatgcactgcagcgtggtaagggcctgagccatggggtcccggaacacccagccctgcccacagccagcccaggcctgcaggactcctgggagtggggcggctgcagccccgacatgggcttcggggagcgcttttctaaggactttctggactcccgggagcctcacagagacatccacgcgagaatgaggcttcacaacaaccgagttgggaggcaggcagtgatggagaacatgcggcggaagtgcaagtgccacggcacgtcaggcagctgccagctcaagacgtgctggcaggtgacgcccgagttccgcaccgtgggggcgctgctgcgcagccgcttccaccgcgccacgctcatccggccgcacaaccgcaacggcggccagctggagccgggcccagcgggggcaccctcgccggctccgggcgctcccgggccgcgccgacgggccagccccgccgacctggtctacttcgaaaagtctcccgacttctgcgagcgcgagccgcgcctggactcggcgggcaccgtgggccgcctgtgcaacaagagcagcgccggctcggatggctgcggcagcatgtgctgcggccgcggccacaacatcctgcgccagacgcgcagcgagcgctgccactgccgcttccactggtgctgtttcgtggtctgcgaagagtgccgcatcaccgagtgggtcagcgtctgcaag

SEQ ID NO: 5989 - DNA, 594 bp, Homo Sapiens
tgtaacaaagcactctgtgctagtgatgtgagcaaatgcctcattcaggagctctgccagtgccggccgggagaaggcaattgctcctgctgtaaggagtgcatgctgtgtcttggggccctttgggacgagtgctgtgactgtgttggtatgtgtaatcctcgaaattatagtgacacacctccaacttcaaagagcacagtggaggagctgcatgaaccgatcccttctctcttccgggcactcacagaaggagatactcagttgaattggaacatcgtttctttccctgttgcagaagaactttcacatcatgagaatctggtttcatttttagaaactgtgaaccagccacaccaccagaatgtgtctgtccccagcaataatgttcacgcgccttattccagtgacaaagaacacatgtgtactgtggtttattttgatgactgcatgtccatacatcagtgtaaaatatcctgtgagtccatgggagcatccaaatatcgctggtttcataatgcctgctgcgagtgcattggtccagaatgtattgactatggtagtaaaactgtcaaatgtatgaactgcatgttt

SEQ ID NO: 5990 - DNA, 639 bp, Homo Sapiens
gctgagggccggctggctctcaagctgttccgtgacctctttgccaactacacaagtgccctgagacctgtggcagacacagaccagactctgaatgtgaccctggaggtgacactgtcccagatcatcgacatggatgaacggaaccaggtgctgaccctgtatctgtggatacggcaggagtggacagatgcctacctacgatgggaccccaatgcctatggtggcctggatgccatccgcatccccagcagtcttgtgtggcggccagacatcgtactctataacaaagccgacgcgcagcctccaggttccgccagcaccaacgtggtcctgcgccacgatggcgccgtgcgctgggacgcgccggccatcacgcgcagctcgtgccgcgtggatgtagcagccttcccgttcgacgcccagcactgcggcctgacgttcggctcctggactcacggcgggcaccaactggatgtgcggccgcgcggcgctgcagccagcctggcggacttcgtggagaacgtggagtggcgcgtgctgggcatgccggcgcggcggcgcgtgctcacctacggctgctgctccgagccctaccccgacgtcaccttcacgctgctgttgcgccgccgcgccgcc

SEQ ID NO: 5991 - DNA, 357 bp, Homo Sapiens
gaagatgcctcctctgactcgacgggtgctgatcctgcccaggaagctgggacctctaagcctaatgaagagatctcaggtccagcagaaccagcttcacccccagagacaaccacaacagcccaggagacttcggcggcagcagttcaggggacagccaaagtcacctcaagcaggcaggaactaaaccccctgaaatccatagtggagaaaagtatcttactaacagaacaagcccttgcaaaagcaggaaaaggaatgcacggaggcgtgccaggtggaaaacaattcatcgaaaatggaagtgaatttgcacaaaaattactgaagaaattcagtctattaaaaccatgggca

SEQ ID NO: 5992 - DNA, 300 bp, Homo Sapiens
ctggcggggaccccggagcaccgctgtcgagtgccggacgccgcgaacctgagcagcgcctggcgcaacaacagtgtcccgctgcggctgcgggacggccgcgaggtgccccacagctgcagccgctaccggctcgccaccatcgccaacttctcggcgctcgggctggagccggggcgcgacgtggacctggggcagctggagcaggagagctgcctggatggctgggagttcagccaggacgtctacctgtccaccgtcgtgaccgagtggaatctggtgtgtgaggacaactggaag

SEQ ID NO: 5993 - DNA, 1425 bp, Homo Sapiens
tacctcctgcccaacgtcactctcttagaggagctgctcagcaaataccagcacaacgagtctcactcccgggtccgcagagccatccccagggaggacaaggaggagatcctcatgctgcacaacaagcttcggggccaggtgcagcctcaggcctccaacatggagtacatgacctgggatgacgaactggagaagtctgctgcagcgtgggccagtcagtgcatctgggagcacgggcccaccagtctgctggtgtccatcgggcagaacctgggcgctcactggggcaggtatcgctctccggggttccatgtgcagtcctggtatgacgaggtgaaggactacacctacccctacccgagcgagtgcaacccctggtgtccagagaggtgctcggggcctatgtgcacgcactacacacagatagtttgggccaccaccaacaagatcggttgtgctgtgaacacctgccggaagatgactgtctggggagaagtttgggagaacgcggtctactttgtctgcaattattctccaaaggggaactggattggagaagccccctacaagaatggccggccctgctctgagtgcccacccagctatggaggcagctgcaggaacaacttgtgttaccgagaagaaacctacactccaaaacctgaaacggacgagatgaatgaggtggaaacggctcccattcctgaagaaaaccatgtttggctccaaccgagggtgatgagacccaccaagcccaagaaaacctctgcggtcaactacatgacccaagtcgtcagatgtgacaccaagatgaaggacaggtgcaaagggtccacgtgtaacaggtaccagtgcccagcaggctgcctgaaccacaaggcgaagatctttggaactctgttctatgaaagctcgtctagcatatgccgcgccgccatccactacgggatcctggatgacaagggaggcctggtggatatcaccaggaacgggaaggtccccttcttcgtgaagtctgagagacacggcgtgcagtccctcagcaaatacaaaccttccagctcattcatggtgtcaaaagtgaaagtgcaggatttggactgctacacgaccgttgctcagctgtgcccgtttgaaaagccagcaactcactgcccaagaatccattgtccggcacactgcaaagacgaaccttcctactgggctccggtgtttggaaccaacatctatgcagatacctcaagcatctgcaagacagccgtgcacgcgggagtcatcagcaacgagagtgggggtgacgtggacgtgatgcccgtggataaaaagaagacctacgtgggctcgctcaggaatggagttcagtctgaaagcctggggactcctcgggatggaaaggccttccggatctttgctgtcaggcag

SEQ ID NO: 5994 - DNA, 465 bp, Homo Sapiens
caaagaaagaaggagatggtgttatcagaaaaggttagtcagctgatggaatggactaacaaaagacctgtaataagaatgaatggagacaagttccgtcgccttgtgaaagccccaccgagaaattactccgttatcgtcatgttcactgctctccaactgcatagacagtgtgtcgtttgcaagcaagctgatgaagaattccagatcctggcaaactcctggcgatactccagtgcattcaccaacaggatattttttgccatggtggattttgatgaaggctctgatgtatttcagatgctaaacatgaattcagctccaactttcatcaactttcctgcaaaagggaaacccaaacggggtgatacatatgagttacaggtgcggggtttttcagctgagcagattgcccggtggatcgccgacagaactgatgtcaatattagagtgattagaccccca

SEQ ID NO: 5995 - DNA, 1446 bp, Homo Sapiens
ccgtgtccagaccggccggcgtcacagcgaatgtggaggatagactacagtgccgctgttatctatgactttctggctgtggatgatataaacggggacaggatccaagatgttctttttctttataaaaacaccaacagcagcaacaatttcagccgatcctgtgtggacgaaggcttttcctctccctgcacctttgcagctgctgtgtcgggggccaacggcagcacgctctgggagagacctgtggcccaagacgtggccctcgtggagtgtgctgtgccccagccaagaggcagtgaggcaccttctgcctgcatcctggtgggcagacccagttctttcattgcagtcaacttgttcacaggggaaaccctgtggaaccacagcagcagcttcagcgggaatgcgtccatcctgagccctctgctgcaggtgcctgatgtggacggcgatggggccccagacctgctggttctcacccaggagcgggaggaggttagtggccacctctactccggcagcaccgggcaccagattggcctcagaggcagccttggtgtggacggggaaagtggcttcctccttcacgtcaccaggacaggtgcccactacatcctctttccctgcgcaagctccctctgcggctgctctgtgaagggtctctacgagaaggtgaccgggagcggcggcccgttcaagagtgacccgcactgggagagcatgctcaatgccaccacccgcaggatgctttcccacagctctggagcagtgcgctacctgatgcatgtcccagggaacgccggtgcagatgtgcttcttgtgggctcagaggccttcgtgctgctggacgggcaggagctgacgcctcgctggacacccaaggcagcccatgtcctgagaaaacccatcttcggccgctacaaaccagacaccttggctgtagccgttgaaaacggaactggcaccgacagacagatcctgtttctggaccttggcactggagccgtcctgtgtagcctagccctcccgagcctccctgggggtccactgtccgccagcctgccgaccgcagaccaccgctcagccttcttcttctggggcctccacgagctggggagcaccagcgagacggagaccggggaggcccggcacagcctgtacatgttccaccccaccctgccgcgcgtgctgctggagctggccaatgtctctacccacattgtcgcctttgacgccgtcctgtttgagccaagccgccacgccgcctacatccttctgacaggcccggcagactcagaggcacccggcctggtctctgtgatcaagcacaaggtgcgggaccttgtcccaagcagcagggtggtccgcctgggtgagggtgggccagacagtgaccaagccatcagggaccggttctcccggctgcggtaccagagtgaggcg

SEQ ID NO: 5996 - DNA, 336 bp, Homo Sapiens
aggaagaaaacctttctaagcgtccatgaagtgatggcagtagaaaactatgcgaaggacagcttgcagtggatcaccgaccagtataacaaggaaagtgatgacaagtaccacttcaggatcttccgagtccttaaagtccagaggcaggtcactgaccacctggagtatcacctgaacgtggaaatgcagtggaccacctgccaaaagccagagaccacgaactgtgtcccccaggaaagggagcttcacaagcaagtcaactgcttcttctcagtgtttgctgtaccctggtttgaacagtacaaaattttgaacaaaagctgcagcagtgac

SEQ ID NO: 5997 - DNA, 378 bp, Homo Sapiens
gccaagctgggtcacttccaaaggtgggagggcttccagcagaagctcatgagcaagaagaacatgaattcaacactcaacttcttcattcaatcctacaacaatgccagcaacgacacctacttatatcgagtccagaggctaattcgaagtcagatgcagctgacgacgggagtggagtatatagtcactgtgaagattggccggaccaaatgcaagaggaatgacacgagcaattcttcctgccccctgcaaagcaagaagctgagaaagagtttaatttgcgagtctttgatatacaccatgccctggataaactatttccagctctggaacaattcctgtctggaggccgagcatgtgggcagaaacctcaga

SEQ ID NO: 5998 - DNA, 1290 bp, Homo Sapiens
catcagaacctgaaggagtttgccctgaccaacccagagaagagcagcaccaaagaaacggagagaaaagaaaccaaagccgaggaggagctggatgccgaagtcctggaggtgttccacccgacgcatgagtggcaggcccttcagccagggcaggctgtccctgcaggatcccacgtacggctgaatcttcagactggggaaagagaggcaaaactccaatatgaggacaagttccgaaataatttgaaaggcaaaaggctggatatcaacaccaacacctacacatctcaggatctcaagagtgcactggcaaaattcaaggagggggcagagatggagagttcaaaggaagacaaggcaaggcaggctgaggtaaagcggctcttccgccccattgaggaactgaagaaagactttgatgagctgaatgttgtcattgagactgacatgcagatcatggtacggctgatcaacaagttcaatagttccagctccagtttggaagagaagattgctgcgctctttgatcttgaatattatgtccatcagatggacaatgcgcaggacctgctttcctttggtggtcttcaagtggtgatcaatgggctgaacagcacagagcccctcgtgaaggagtatgctgcgtttgtgctgggcgctgccttttccagcaaccccaaggtccaggtggaggccatcgaagggggagccctgcagaagctgctggtcatcctggccacggagcagccgctcactgcaaagaagaaggtcctgtttgcactgtgctccctgctgcgccacttcccctatgcccagcggcagttcctgaagctcggggggctgcaggtcctgaggaccctggtgcaggagaagggcacggaggtgctcgccgtgcgcgtggtcacactgctctacgacctggtcacggagaagatgttcgccgaggaggaggctgagctgacccaggagatgtccccagagaagctgcagcagtatcgccaggtacacctcctgccaggcctgtgggaacagggctggtgcgagatcacggcccacctcctggcgctgcccgagcatgatgcccgtgagaaggtgctgcagacactgggcgtcctcctgaccacctgccgggaccgctaccgtcaggacccccagctcggcaggacactggccagcctgcaggctgagtaccaggtgctggccagcctggagctgcaggatggtgaggacgagggctacttccaggagctgctgggctctgtcaacagcttgctgaaggagctgaga

SEQ ID NO: 5999 - DNA, 900 bp, Homo Sapiens
cggaggatgtggacgctgcggagcccgctcacccgctccctgtacgtgaacatgactagcggcccgggtgggccggcggcggccgcgggcggcaggaaggagaaccaccagtggtatgtgtgcaacagagagaaattatgcgaatcactccaggctgtctttgttcagagttaccttgatcaaggaacacagatcttcttaaacaacagcattgagaaatcgggctggctatttatccaattatatcattcttttgtgtcatctgtttttagcctgtttatgtctagaacatctatcaatgggttgctaggaagaggctcaatgtttgtgttttcaccagatcagtttcagagactgcttaaaattaatccagactggaaaacccacagacttcttgatttaggtgctggagatggagaagtcacaaaaatcatgagccctcattttgaagaaatctatgccactgagctttctgaaactatgatatggcagcttcagaaaaagaaatacagagtccttggtataaatgaatggcagaatacggggttccagtatgatgtcatcagctgcctgaacttgctggaccgctgtgatcagcccctgactttgttaaaagatatcagaagtgtcttggagccaactagaggcagggtcatccttgcccttgtcctcccctttcatccctatgtggaaaacgtaggtggcaagtgggagaaaccatcagaaattttggaaatcaaaggacagaactgggaagaacaagtgaatagtctgcctgaagttttcagaaaagctggttttgttatcgaagctttcaccagactaccatacctgtgtgaaggcgacatgtataatgactactacgttctggatgacgctgtctttgttctcaaaccagta

SEQ ID NO: 6000 - DNA, 384 bp, Homo Sapiens
aagcccaagggcatgacctcatcacagtggtttaaaattcagcacatgcagcccagccctcaagcatgcaactcagccatgaaaaacattaacaagcacacaaaacggtgcaaagacctcaacaccttcctgcacgagcctttctccagtgtggccgccacctgccagacccccaaaatagcctgcaagaatggcgataaaaactgccaccagagccacgggcccgtgtccctgaccatgtgtaagctcacctcagggaagtatccgaactgcaggtacaaagagaagcgacagaacaagtcttacgtagtggcctgtaagcctccccagaaaaaggactctcagcaattccacctggttcctgtacacttggacagagtcctt

SEQ ID NO: 6001 - DNA, 174 bp, Homo Sapiens
ggataccgtgacaagaagaggatgcagaaaacacagctatccccagaaatcaaagtctgccagcagcagcctaaactatatctatgcaaacacttatgtgaatctcaccgagattgtcaagcaaataacatatgctgttctacctactgtgggaatgtttgcatgagcatcctg

SEQ ID NO: 6002 - DNA, 1026 bp, Homo Sapiens
cagcttctgacagacgccaactcctggtggtcattagctttgaacccggtgcagagacccgagatgtttatcatcggtgcccagcccgtgtgcagtcagcttcccgggctctcccctggccagaggaagctgtgccaattgtaccaggagcacatggcctacataggggagggagccaagactggcatcaaggaatgccagcaccagttccggcagcggcggtggaattgcagcacagcggacaacgcatctgtctttgggagagtcatgcagataggcagccgagagaccgccttcacccacgcggtgagcgccgcgggcgtggtcaacgccatcagccgggcctgccgcgagggcgagctctccacctgcggctgcagccggacggcgcggcccaaggacctgccccgggactggctgtggggcggctgtggggacaacgtggagtacggctaccgcttcgccaaggagtttgtggatgcccgggagcgagagaagaactttgccaaaggatcagaggagcagggccgggtgctcatgaacctgcaaaacaacgaggccggtcgcagggctgtgtataagatggcagacgtagcctgcaaatgccacggcgtctcggggtcctgcagcctcaagacctgctggctgcagctggccgagttccgcaaggtcggggaccggctgaaggagaagtacgacagcgcggccgccatgcgcgtcacccgcaagggccggctggagctggtcaacagccgcttcacccagcccaccccggaggacctggtctatgtggaccccagccccgactactgcctgcgcaacgagagcacgggctccctgggcacgcagggccgcctctgcaacaagacctcggagggcatggatggctgtgagctcatgtgctgcgggcgtggctacaaccagttcaagagcgtgcaggtggagcgctgccactgcaagttccactggtgctgcttcgtcaggtgtaagaagtgcacggagatcgtggaccagtacatctgtaaa

SEQ ID NO: 6003 - DNA, 492 bp, Homo Sapiens
gaatttattggcttgagacgctgtttaatgggtttggggagatgcagggatcactgcaatgtggatgaaaaagagatacagaaatgcaagatgaaaaaatgttgtgttggaccaaaagtggttaaattgattaaaaactacctacaatatggaacaccaaatgtacttaatgaagacgtccaagaaatgctaaaacctgccaagaattctagtgctgtgatacaaagaaaacatattttatctgttctcccccaaatcaaaagcactagcttttttgctaataccaactttgtcatcattccaaatgccacccctatgaactctgccaccatcagcactatgaccccaggacagatcacatacactgctacttctaccaagagtaacaccaaagaaagcagagattctgccactgcctcgccaccaccagcaccacctccaccaaacatactgccaacaccatcactggagctagaggaagcagaagagcag

SEQ ID NO: 6004 - DNA, 192 bp, Homo Sapiens
aagcggcagctgtgggaccggactcggcccgaggtgcagcagtggtaccagcagtttctctacatgggctttgacgaagcgaaatttgaagatgacatcacctattggcttaacagagatcgaaatggacatgaatactatggcgattactaccaacgtcactatgatgaagactctgcaattggtccccgg

SEQ ID NO: 6005 - DNA, 189 bp, Homo Sapiens
atgataaacttgagcagcctgtggacagtgcccgcgtggatttccaaagtgtccttcctgcggtggtgttttgaagggctgatgaagattcagttcagcagaagaacttataaaatgcctctcgggaacctcaccatcgcggtctcaggagataaaatcctcagtgccatggagctggactcgtaccct

SEQ ID NO: 6006 - DNA, 288 bp, Homo Sapiens
ggcttcaaagcaaatgtcataaatgagaaatgcattacacaaaattcagagacgatcatgaaatttttgaaaatggggaacattagtcaggatattattccccatcatatcaacctttcaactgttactgcagaagattatcatttagtttatgacatcattcaaaaagtgaaagaagaagagtttcctgctcttcatctcaattcctgtaaaattgaagaagagctaaataaagctgttcaggggaccggcttagcttttattgcctttacagaagcgatgacacat

SEQ ID NO: 6007 - DNA, 705 bp, Homo Sapiens
ttgctggaaggtgacgagtgtgcaccccactcccagccatggcaagtggctctctacgagcgtggacgctttaactgtggcgcttccctcatctccccacactgggtgctgtctgcggcacactgccaaagccgcttcatgagagtgcgcctgggagagcacaacctgcgcaagcgcgatggcccagagcaactacggaccacgtctcgggtcattccacacccgcgctacgaagcgcgcagccaccgcaacgacatcatgttgctgcgcctagtccagcccgcacgcctgaacccccaggtgcgccccgcggtgctacccacgcgttgcccccacccgggggaggcctgtgtggtgtctggctggggcctggtgtcccacaacgagcctgggaccgctgggagcccccggtcacaagtgagtctcccagatacgttgcattgtgccaacatcagcattatctcggacacatcttgtgacaagagctacccagggcgcctgacaaacaccatggtgtgtgcaggcgcggagggcagaggcgcagaatcctgtgagggtgactctgggggacccctggtctgtgggggcatcctgcagggcattgtgtcctggggtgacgtcccttgtgacaacaccaccaagcctggtgtctataccaaagtctgccactacttggagtggatcagggaaaccatgaagaggaac

SEQ ID NO: 6008 - DNA, 1476 bp, Homo Sapiens
agaaaaactgttccaggggataatgaatctgaagaagactccaaaataaaaggcatccatgatgaaaagtatgttgaattgttcattgttgctgatgatactgtgtatcgcagaaatggtcatcctcacaataaactaaggaaccgaatttggggaatggtcaattttgtcaacatgatttataaaaccttaaacatccatgtgacgttggttggcattgaaatatggacacatgaagataaaatagaactatattcaaatatagaaactaccttattgcgtttttcattttggcaagaaaagatccttaaaacacggaaggattttgatcatgttgtattactcagtgggaagtggctctactcacatgtgcaaggaatttcttatccagggggtatgtgcctgccctattattccaccagtatcattaaggatcttttacctgacacaaacataattgcaaacagaatggcacatcaactggggcataaccttgggatgcagcatgacgagttcccatgcacctgtccttcaggaaaatgcgtgatggacagtgatggaagcattcctgcactgaaattcagtaaatgcagccaaaaccaataccaccagtacttgaaggattataagccaacatgcatgctcaacattccatttccttacaattttcatgatttccaattttgtggaaacaagaagttggatgagggtgaagagtgtgactgtggccctgctcaggagtgtactaatccttgctgtgatgcacacacatgtgtactgaagccaggatttacttgtgcagaaggagaatgctgtgaatcttgtcagataaaaaaagcagggtccatatgcagaccggcgaaagatgaatgtgattttcctgagatgtgcactggccactcgcctgcctgtcctaaggaccagttcagggtcaatggatttccttgcaagaactcagaaggctactgtttcatggggaaatgtccaactcgtgaggatcagtgctctgaactatttgatgatgaggcaatagagagtcatgatatctgctacaagatgaatacaaaaggaaataaatttggatactgcaaaaacaaggaaaacagatttcttccctgtgaggagaaagatgtcagatgtggaaagatctactgcactggaggggagctttcctctctccttggagaagacaagacttatcaccttaaggatccccagaagaatgctactgtcaaatgcaaaactatttttttataccatgattctacagacattggcctggtggcgtcaggaacaaaatgtggagagggaatggtgtgcaacaatggtgaatgtctaaacatggaaaaggtctatatctcaaccaattgcccctctcagtgcaatgaaaatcctgtggatggccacggactccagtgccactgtgaggaaggacaggcacctgtagcctgtgaagaaaccttacatgttaccaat

SEQ ID NO: 6009 - DNA, 1245 bp, Homo Sapiens
tatggctacaccctccctgggtggagaaaatacaacctcacctacagaataataaactatactccggatatggcacgagctgctgtggatgaggctatccaagaaggtttagaagtgtggagcaaagtcactccactaaaattcaccaagatttcaaaggggattgcagacatcatgattgcctttaggactcgagtccatggtcggtgtcctcgctattttgatggtcccttgggagtgcttggccatgcctttcctcctggtccgggtctgggtggtgacactcattttgatgaggatgaaaactggaccaaggatggagcaggattcaacttgtttcttgtggctgctcatgaatttggtcatgcactggggctctctcactccaatgatcaaacagccttgatgttcccaaattatgtctccctggatcccagaaaatacccactttctcaggatgatatcaatggaatccagtccatctatggaggtctgcctaaggaacctgctaagccaaaggaacccactataccccatgcctgtgaccctgacttgacttttgacgctatcacaactttccgcagagaagtaatgttctttaaaggcaggcacctatggaggatctattatgatatcacggatgttgagtttgaattaattgcttcattctggccatctctgccagctgatctgcaagctgcatacgagaaccccagagataagattctggtttttaaagatgaaaacttctggatgatcagaggatatgctgtcttgccagattatcccaaatccatccatacattaggttttccaggacgtgtgaagaaaatagatgcagccgtctgtgataagaccacaagaaaaacctacttctttgtgggcatttggtgctggaggtttgatgaaatgacccaaaccatggacaaagggttcccgcagagagtggtaaaacactttcctggaatcagtatccgtgttgatgctgctttccagtacaaaggattcttctttttcagccgtggatcaaagcaatttgaatacgacattaagacaaagaatattacccgaatcatgagaactaatacttggtttcaatgcaaagaaccaaagaactcctcatttggttttgatatcaacaaggaaaaagcacattcaggaggcataaagatattgtatcataagagtttaagcttgtttatttttggtattgttcatttgctgaaaaacacttctatttatcaa

SEQ ID NO: 6010 - DNA, 1431 bp, Homo Sapiens
atggtggttcccaatgccactttattggagaaacttttggaaaaatacatggatgaggatggtgagtggtggatagccaaacaacgagggaaaagggccatcacagacaatgacatgcagagtattttggaccttcataataaattacgaagtcaggtgtatccaacagcctctaatatggagtatatgacatgggatgtagagctggaaagatctgcagaatcctgggctgaaagttgcttgtgggaacatggacctgcaagcttgcttccatcaattggacagaatttgggagcacactggggaagatataggcccccgacgtttcatgtacaatcgtggtatgatgaagtgaaagactttagctacccatatgaacatgaatgcaacccatattgtccattcaggtgttctggccctgtatgtacacattatacacaggtcgtgtgggcaactagtaacagaatcggttgtgccattaatttgtgtcataacatgaacatctgggggcagatatggcccaaagctgtctacctggtgtgcaattactccccaaagggaaactggtggggccatgccccttacaaacatgggcggccctgttctgcttgcccacctagttttggagggggctgtagagaaaatctgtgctacaaagaagggtcagacaggtattatccccctcgagaagaggaaacaaatgaaatagaacgacagcagtcacaagtccatgacacccatgtccggacaagatcagatgatagtagcagaaatgaagtcataagcgcacagcaaatgtcccaaattgtttcttgtgaagtaagattaagagatcagtgcaaaggaacaacctgcaataggtacgaatgtcctgctggctgtttggatagtaaagctaaagttattggcagtgtacattatgaaatgcaatccagcatctgtagagctgcaattcattatggtataatagacaatgatggtggctgggtagatatcactagacaaggaagaaagcattatttcatcaagtccaatagaaatggtattcaaacaattggcaaatatcagtctgctaattccttcacagtctctaaagtaacagttcaggctgtgacttgtgaaacaactgtggaacagctctgtccatttcataagcctgcttcacattgcccaagagtatactgtcctcgtaactgtatgcaagcaaatccacattatgctcgtgtaattggaactcgagtttattctgatctgtccagtatctgcagagcagcagtacatgctggagtggttcgaaatcacggtggttatgttgatgtaatgcctgtggacaaaagaaagacctacattgcttcttttcagaatggaatcttctcagaaagtttacagaatcctccaggaggaaaggcattcagagtgtttgctgttgtg

SEQ ID NO: 6011 - DNA, 1362 bp, Homo Sapiens
ctgtttcgctccctatacagaagtgtttccatgccacctaagggagactcaggacagccattatttctcaccccttacattgaagctgggaagatccaaaaaggaagagaattgagtttggtcggccctttcccaggactgaacatgaagagttatgccggcttcctcaccgtgaataagacttacaacagcaacctcttcttctggttcttcccagctcagatacagccagaagatgccccagtagttctctggctacagggtgggccgggaggttcatccatgtttggactctttgtggaacatgggccttatgttgtcacaagtaacatgaccttgcgtgacagagacttcccctggaccacaacgctctccatgctttacattgacaatccagtgggcacaggcttcagttttactgatgatacccacggatatgcagtcaatgaggacgatgtagcacgggatttatacagtgcactaattcagtttttccagatatttcctgaatataaaaataatgacttttatgtcactggggagtcttatgcagggaaatatgtgccagccattgcacacctcatccattccctcaaccctgtgagagaggtgaagatcaacctgaacggaattgctattggagatggatattctgatcccgaatcaattatagggggctatgcagaattcctgtaccaaattggcttgttggatgagaagcaaaaaaagtacttccagaagcagtgccatgaatgcatagaacacatcaggaagcagaactggtttgaggcctttgaaatactggataaactactagatggcgacttaacaagtgatccttcttacttccagaatgttacaggatgtagtaattactataactttttgcggtgcacggaacctgaggatcagctttactatgtgaaatttttgtcactcccagaggtgagacaagccatccacgtggggaatcagacttttaatgatggaactatagttgaaaagtacttgcgagaagatacagtacagtcagttaagccatggttaactgaaatcatgaataattataaggttctgatctacaatggccaactggacatcatcgtggcagctgccctgacagagcgctccttgatgggcatggactggaaaggatcccaggaatacaagaaggcagaaaaaaaagtttggaagatctttaaatctgacagtgaagtggctggttacatccggcaagtgggtgacttccatcaggtaattattcgaggtggaggacatattttaccctatgaccagcctctgagagcttttgacatgattaatcgattcatttatggaaaaggatgggatccttatgttgga

SEQ ID NO: 6012 - DNA, 462 bp, Homo Sapiens
cggcggagcaacgttcgcgtcatcacggacgagaactggagagaactgctggaaggagactggatgatagaattttatgccccgtggtgccctgcttgtcaaaatcttcaaccggaatgggaaagttttgctgaatggggagaagatcttgaggttaatattgcgaaagtagatgtcacagagcagccaggactgagtggacggtttatcataactgctcttcctactatttatcattgtaaagatggtgaatttaggcgctatcagggtccaaggactaagaaggacttcataaactttataagtgataaagagtggaagagtattgagcccgtttcatcatggtttggtccaggttctgttctgatgagtagtatgtcagcactctttcagctatctatgtggatcaggacgtgccataactactttattgaagaccttggattgccagtgtggggatca

SEQ ID NO: 6013 - DNA, 1161 bp, Homo Sapiens
tatctgtgtcctgctgcctctcagcccatttccgggaccttgcaggatgaggagataactttgagctgctcagaggccagcgctgaggaagctctgctccctgcacttcccaaaacagtatctttcagaataaacagcgaagacttcttgctggaagcgcaagtgagggatcagccacgctggctcctggtctgccatgagggctggagccccgccctggggctgcagatctgctggagccttgggcatctcagactcactcaccacaagggagtaaacctcactgacatcaaactcaacagttcccaggagtttgctcagctctctcctagactgggaggcttcctggaggaggcgtggcagcccaggaacaactgcacttctggtcaagttgtttccctcagatgctctgagtgtggagcgaggcccctggcttcccggatagttggtgggcagtctgtggctcctgggcgctggccgtggcaggccagcgtggccctgggcttccggcacacgtgtgggggctctgtgctagcgccacgctgggtggtgactgctgcacattgtatgcacagtttcaggctggcccgcctgtccagctggcgggttcatgcggggctggtcagccacagtgccgtcaggccccaccaaggggctctggtggagaggattatcccacaccccctctacagtgcccagaatcatgactacgacgtcgccctcctgaggctccagaccgctctcaacttctcagacactgtgggcgctgtgtgcctgccggccaaggaacagcattttccgaagggctcgcggtgctgggtgtctggctggggccacacccaccctagccatacttacagctcggatatgctccaggacacggtggtgcccctgctcagcactcagctctgcaacagctcttgcgtgtacagcggagccctcaccccccgcatgctttgcgctggctacctggacggaagggctgatgcatgccagggagatagcgggggccccctagtgtgcccagatggggacacatggcgcctagtgggggtggtcagctgggggcgtggctgcgcagagcccaatcacccaggtgtctacgccaaggtagctgagtttctggactggatccatgacactgctcaggactccctcctc

SEQ ID NO: 6014 - DNA, 1275 bp, Homo Sapiens
cagaagttctcggcgctcacgtttttgagagtggatcaagataaagacaaggattgtagcttggactgtgcgggttcgccccagaaacctctctgcgcatctgacggaaggaccttcctttcccgttgtgaatttcaacgtgccaagtgcaaagatccccagctagagattgcatatcgaggaaactgcaaagacgtgtccaggtgtgtggccgaaaggaagtatacccaggagcaagcccggaaggagtttcagcaagtgttcattcctgagtgcaatgacgacggcacctacagtcaggtccagtgtcacagctacacgggatactgctggtgcgtcacgcccaacgggaggcccatcagcggcactgccgtggcccacaagacgccccggtgcccgggttccgtaaatgaaaagttaccccaacgcgaaggcacaggaaaaacagatgatgccgcagctccagcgttggagactcagcctcaaggagatgaagaagatattgcatcacgttaccctaccctttggactgaacaggttaaaagtcggcagaacaaaaccaataagaattcagtgtcatcctgtgaccaagagcaccagtctgccctggaggaagccaagcagcccaagaacgacaatgtggtgatccctgagtgtgcgcacggcggcctctacaagccagtgcagtgccacccctccacggggtactgctggtgcgtcctggtggacacggggcgccccattcccggcacatccacaaggtacgagcagccgaaatgtgacaacacggccagggcccacccagccaaagcccgggacctgtacaagggccgccagctacaaggttgtccgggtgccaaaaagcatgagtttctgaccagcgttctggacgcgctgtccacggacatggtccacgccgcctccgacccctcctcctcgtcaggcaggctctcagaacccgaccccagccataccctagaggagcgggtggtgcactggtacttcaaactactggataaaaactccagtggagacatcggcaaaaaggaaatcaaacccttcaagaggttccttcgcaaaaaatcaaagcccaaaaaatgtgtgaagaagtttgttgaatactgtgacgtgaataatgacaaatccatctccgtacaagaactgatgggctgcctgggcgtggcgaaagaggacggcaaagcggacaccaagaaacgccacacccccagaggtcatgttgaaagtacgtctaatagacagccaaggaaacaagga

SEQ ID NO: 6015 - DNA, 591 bp, Homo Sapiens
cacatctctgtgagagacatgaatgccttactggattatcacaaccacatccgggccagtgtgtacccacctgccgccaacatggaatacatggtctgggacaagcggctggccagggctgccgaagcctgggccacccagtgcatctgggcacatgggccttcacagctgatgagatacgtgggccagaacctctccatccattctggccagtaccggtccgtagtggatctcatgaagtcctggtctgaggagaagtggcattacttgtttccggccccaagggactgtaacccacactgcccctggcgctgcgatggccccacctgctcccattatacccagatggtgtgggcatcctccaatcggctgggctgtgccatccacacctgtagtagcatcagtgtctggggcaacacctggcatcgggcggcatacctggtctgcaactatgccattaagggcaactggattggcgagtccccgtacaagatgggaaagccgtgctcctcctgtccccccagttatcaaggcagctgcaatagcaacatgtgcttcaaggggctgaaatccaacaagttcacgtggttc

SEQ ID NO: 6016 - DNA, 744 bp, Homo Sapiens
gcctcggccaaggagctggcatgccaagagatcaccgtgccgctgtgtaagggcatcggctacaactacacctacatgcccaatcagttcaaccacgacacgcaagacgaggcgggcctggaggtgcaccagttctggccgctggtggagatccagtgctcgcccgatctcaagttcttcctgtgcagcatgtacacgcccatctgcctagaggactacaagaagccgctgccgccctgccgctcggtgtgcgagcgcgccaaggccggctgcgcgccgctcatgcgccagtacggcttcgcctggcccgaccgcatgcgctgcgaccggctgcccgagcaaggcaaccctgacacgctgtgcatggactacaaccgcaccgacctaaccaccgccgcgcccagcccgccgcgccgcctgccgccgccgccgcccggcgagcagccgccttcgggcagcggccacggccgcccgccgggggccaggcccccgcaccgcggcggcggcaggggcggtggcggcggggacgcggcggcgcccccagctcgcggcggcggcggtggcgggaaggcgcggccccctggcggcggcgcggctccctgcgagcccgggtgccagtgccgcgcgcctatggtgagcgtgtccagcgagcgccacccgctctacaaccgcgtcaagacaggccagatcgctaactgcgcgctgccctgccacaacccctttttcagccaggacgagcgcgcc

SEQ ID NO: 6017 - DNA, 1116 bp, Homo Sapiens
gcctccaggccgtgggagggaaccgacgagccgggctcggcctgggcctggccgggcttccagcgcctgcaggagcagctcagggcggcgggtgccctctccaagcggtactggacgctcttcagctgccaggtgtggcccgacgactgtgacgaggacgaggaggcagccacggggcccctgggctggcgccttcctctgttgggccagcggtacctggacctcctgaccacgtggtactgcagcttcaaagactgctgccctagaggggattgcagaatctccaacaactttacaggcttagagtgggacctgaatgtgcggctgcatggccagcatttggtccagcagctggtcctaagaacagtgaggggctacttagagacgccccagccagaaaaggcccttgctctgtcgttccacggctggtctggcacaggcaagaacttcgtggcacggatgctggtggagaacctgtatcgggacgggctgatgagtgactgtgtcaggatgttcatcgccacgttccactttcctcaccccaaatatgtggacctgtacaaggagcagctgatgagccagatccgggagacgcagcagctctgccaccagaccctgttcatcttcgatgaagcggagaagctgcacccagggctgctggaggtccttgggccacacttagaacgccgggcccctgagggccacagggctgagtctccatggactatctttctgtttcccagtaatctcaggggcgatataatcaatgaggtggtcctaaagttgctcaaggctggatggtcccgggaagaaattacgatggaacacctggagccccacctccaggcggagattgtggagaccatagacaatggctttggccacagccgtcttgtgaaggaaaacctgattgactacttcatccccttcctgcctttggagtaccgtcacgtgaggctgtgtgcacgggatgccttcctgagccaggagctcctgtataaagaagagacactggatgaaatagcccagatgatggtgtatgtccccaaggaggaacaactcttttcttcccagggctgcaagtctatttcccagaggattaactacttcctgtca

SEQ ID NO: 6018 - DNA, 1947 bp, Homo Sapiens
gcgagcggcgagcattcccccggcagcggcgcggcccggcggccgctgcactccgcgcaggctgtggacgtggcctcggcctccaacttccgggcctttgagctgctgcacttgcacctggacctgcgggctgagttcgggcctccagggcccggcgcagggagccgggggctgagcggcaccgcggtcctggacctgcgctgcctggagcccgagggcgccgccgagctgcggctggactcgcacccgtgcctggaggtgacggcggcggcgctgcggcgggagcggcccggctcggaggagccgcctgcggagcccgtgagcttctacacgcagcccttctcgcactatggccaggccctgtgcgtgtccttcccgcagccctgccgcgccgccgagcgcctccaggtgctgctcacctaccgcgtcggggagggacccggggtttgctggttggctcccgagcagacagcaggaaagaagaagcccttcgtgtacacccagggccaggctgtcctaaaccgggccttcttcccttgcttcgacacgcctgctgttaaatacaagtattcagctcttattgaggtcccagatggcttcacagctgtgatgagtgctagcacctgggagaagagaggtccaaataagttcttcttccagatgtgtcagcccatcccctcctatctgatagctttggccatcggagatctggtttcggctgaagttggacccaggagccgggtgtgggctgagccctgcctgattgatgctgccaaggaggagtacaacggggtgatagaagaatttttggcaacaggagagaagctttttggaccttatgtttggggaaggtatgacttgctcttcatgccaccgtcctttccatttggaggaatggagaacccttgtctgacctttgtcaccccctgcctgctagctggggaccgctccttggcagatgtcatcatccatgagatctcccacagttggtttgggaacctggtcaccaacgccaactggggtgaattctggctcaatgaaggtttcaccatgtacgcccagaggaggatctccaccatcctctttggcgctgcgtacacctgcttggaggctgcaacggggcgggctctgctgcgtcaacacatggacatcactggagaggaaaacccactcaacaagctccgcgtgaagattgaaccaggcgttgacccggacgacacctataatgagaccccctacgagaaaggtttctgctttgtctcatacctggcccacttggtgggtgatcaggatcagtttgacagttttctcaaggcctatgtgcatgaattcaaattccgaagcatcttagccgatgactttctggacttctacttggaatatttccctgagcttaagaaaaagagagtggatatcattccaggttttgagtttgatcgatggctgaatacccccggctggcccccgtacctccctgatctctcccctggggactcactcatgaagcctgctgaagagctagcccaactgtgggcagccgaggagctggacatgaaggccattgaagccgtggccatctctccctggaagacctaccagctggtctacttcctggataagatcctccagaaatcccctctccctcctgggaatgtgaaaaaacttggagacacatacccaagtatctcaaatgcccggaatgcagagctccggctgcgatggggccaaatcgtccttaagaacgaccaccaggaagatttctggaaagtgaaggagttcctgcataaccaggggaagcagaagtatacacttccgctgtaccacgcaatgatgggtggcagtgaggtggcccagaccctcgccaaggagacttttgcatccaccgcctcccagctccacagcaatgttgtcaactatgtccagcagatcgtggcacccaagggcagt

SEQ ID NO: 6019 - DNA, 1281 bp, Homo Sapiens
gcggagaccacgccgggcgcccccagagccctctccctgggctcccccagcctcttcaccacgccgggtgtccccagcgccctcactaccccaggcctcactacgccaggcacccccaaaaccctggaccttcggggtcgcgcgcaggccctgatgcggagtttcccactcgtggacggccacaatgacctgccccaggtcctgagacagcgttacaagaatgtgcttcaggatgttaacctgcgaaatttcagccatggtcagaccagcctggacaggcttagagacggcctcgtgggtgcccagttctggtcagcctccgtctcatgccagtcccaggaccagactgccgtgcgcctcgccctggagcagattgacctcattcaccgcatgtgtgcctcctactctgaactcgagcttgtgacctcagctgaaggtctgaacagctctcaaaagctggcctgcctcattggcgtggagggtggtcactcactggacagcagcctctctgtgctgcgcagtttctatgtgctgggggtgcgctacctgacacttaccttcacctgcagtacaccatgggcagagagttccaccaagttcagacaccacatgtacaccaacgtcagcggattgacaagctttggtgagaaagtagtagaggagttgaaccgcctgggcatgatgatagatttgtcctatgcatcggacaccttgataagaagggtcctggaagtgtctcaggctcctgtgatcttctcccactcagctgccagagctgtgtgtgacaatttgttgaatgttcccgatgatatcctgcagcttctgaagaagaacggtggcatcgtgatggtgacactgtccatgggggtgctgcagtgcaacctgcttgctaacgtgtccactgtggcagatcactttgaccacatcagggcagtcattggatctgagttcatcgggattggtggaaattatgacgggactggccggttccctcaggggctggaggatgtgtccacatacccagtcctgatagaggagttgctgagtcgtagctggagcgaggaagagcttcaaggtgtccttcgtggaaacctgctgcgggtcttcagacaagtggaaaaggtgagagaggagagcagggcgcagagccccgtggaggctgagtttccatatgggcaactgagcacatcctgccactcccacctcgtgcctcagaatggacaccaggctactcatctggaggtgaccaagcagccaaccaatcgggtcccctggaggtcc

SEQ ID NO: 6020 - DNA, 2433 bp, Homo Sapiens
agcggcggtggcggggacagccggcagcgccgcctcctcgcggctaaagtcaataagcacaagccatggatcgagacttcatatcatggagtcataactgagaacaatgacacagtcattttggacccaccactggtagccctggataaagatgcaccggttccttttgcaggggaaatctgtgcgttcaagatccatggccaggagctgccctttgaggctgtggtgctcaacaagacatcaggagagggccggctccgtgccaagagccccattgactgtgagttgcagaaggagtacacattcatcatccaggcctatgactgtggtgctgggccccacgagacagcctggaaaaagtcacacaaggccgtggtccatatacaggtgaaggatgtcaacgagtttgctcccaccttcaaagagccagcctacaaggctgttgtgacggagggcaagatctatgacagcattctgcaggtggaggccattgacgaggactgctccccacagtacagccagatctgcaactatgaaatcgtcaccacagatgtgccttttgccatcgacagaaatggcaacatcaggaacactgagaagctgagctatgacaaacaacaccagtatgagatcctggtgaccgcctacgactgtggacagaagcccgctgctcaggacaccctggtgcaggtggatgtgaagccagtttgcaagcctggctggcaagactggaccaagaggattgagtaccagcctggctccgggagcatgcccctgttccccagcatccacctggagacgtgcgatggagccgtgtcttccctccagatcgtcacagagctgcagactaattacattgggaagggttgtgaccgggagacctactctgagaaatcccttcaaaagttatgtggagcctcctctggcatcattgacctcttgccatcccctagcgctgccaccaactggactgcaggactgctggtggacagcagtgagatgatcttcaagtttgacggcaggcagggtgccaaagtccccgatgggattgtgcccaagaacctgaccgatcagttcaccatcaccatgtggatgaaacacggccccagccctggtgtgagagccgagaaggaaaccatcctctgcaactcagacaaaaccgaaatgaaccggcatcactatgccctgtatgtgcacaactgccgcctcgtctttctcttgcggaaggacttcgaccaggctgacacctttcgccccgcggagttccactggaagctggatcagatttgtgacaaagagtggcactactatgtcatcaatgtggagtttcctgtggtaaccttatacatggatggagcaacatatgaaccatacctggtgaccaacgactggcccattcatccatctcacatagccatgcaactcacagtcggcgcttgttggcaaggaggagaagtcaccaaaccacagtttgctcagttctttcatggaagcctggccagtctcaccatccgccctggcaaaatggaaagccagaaggtgatctcctgcctgcaggcctgcaaggaagggctggacattaattccttggaaagccttggccaaggaataaagtatcacttcaacccctcgcagtccatcctggtgatggaaggtgacgacattgggaacattaaccgtgctctccagaaagtctcctacatcaactccaggcagttcccaacggcgggtgtgcggcgcctcaaagtatcctccaaagtccagtgctttggggaagacgtatgcatcagtatccctgaggtagatgcctatgtgatggtcctccaggccatcgagccccggatcaccctccggggcacagaccacttctggagacctgctgcccagtttgaaagtgccaggggagtgaccctcttccctgatatcaagattgtgagcaccttcgccaaaaccgaagcccccggggacgtgaaaaccacagaccccaaatcagaagtcttagaggaaatgcttcataacttagatttctgtgacattttggtgatcggaggggacttggacccaaggcaggagtgcttggagctcaaccacagtgagctccaccaacgacacctggatgccactaattctactgcaggctactccatctacggtgtgggctccatgagccgctatgagcaggtgctacatcacatccgctaccgcaactggcgtccggcttctcttgaggcccggcgtttccggattaagtgctcagaactcaatgggcgctacactagcaatgagttcaacttggaggtcagcatccttcatgaagaccaagtctcagataaggagcatgtcaatcatctgattgtgcagcctcccttcctccagtctgtccatcatcctgagtcccggagtagcatccagcacagttcagtggtcccaagc

SEQ ID NO: 6021 - DNA, 1227 bp, Homo Sapiens
caccgcaccacaggccccaggtttctaataagtgaccgtgacccacagtgcaacctccactgctccaggactcaacccaaacccatctgtgcctctgatggcaggtcctacgagtccatgtgtgagtaccagcgagccaagtgccgagacccgaccctgggcgtggtgcatcgaggtagatgcaaagatgctggccagagcaagtgtcgcctggagcgggctcaagccctggagcaagccaagaagcctcaggaagctgtgtttgtcccagagtgtggcgaggatggctcctttacccaggtgcagtgccatacttacactgggtactgctggtgtgtcaccccggatgggaagcccatcagtggctcttctgtgcagaataaaactcctgtatgttcaggttcagtcaccgacaagcccttgagccagggtaactcaggaaggaaagatgacgggtctaagccgacacccacgatggagacccagccggtgttcgatggagatgaaatcacagccccaactctatggattaaacacttggtgatcaaggactccaaactgaacaacaccaacataagaaattcagagaaagtctattcgtgtgaccaggagaggcagagtgccctggaagaggcccagcagaatccccgtgagggtattgtcatccctgaatgtgcccctgggggactctataagccagtgcaatgccaccagtccactggctactgctggtgtgtgctggtggacacagggcgcccgctgcctgggacctccacacgctacgtgatgcccagttgtgagagcgacgccagggccaagactacagaggcggatgaccccttcaaggacagggagctaccaggctgtccagaagggaagaaaatggagtttatcaccagcctactggatgctctcaccactgacatggttcaggccattaactcagcagcgcccactggaggtgggaggttctcagagccagaccccagccacaccctggaggagcgggtagtgcactggtatttcagccagctggacagcaatagcagcaacgacattaacaagcgggagatgaagcccttcaagcgctacgtgaagaagaaagccaagcccaagaaatgtgcccggcgtttcaccgactactgtgacctgaacaaagacaaggtcatttcactgcctgagctgaagggctgcctgggtgttagcaaagaagtaggacgcctcgtc

SEQ ID NO: 6022 - DNA, 357 bp, Homo Sapiens
tggcatttccacgagcaaagggactgtgatgaacacaatgtcatggctcgttacctccctgccacagtggagtttgctgtccacacattcaaccaacagagcaaggactactatgcctacagactggggcacatcttgaattcctggaaggagcaggtggagtccaagactgtattctcaatggagctactgctggggagaactaggtgtgggaaatttgaagacgacattgacaactgccatttccaagaaagcacagagctgaacaatactttcacctgcttcttcaccatcagcaccaggccctggatgactcagttcagcctcctgaacaagacctgcttggagggattccac

SEQ ID NO: 6023 - DNA, 1914 bp, Homo Sapiens
tttgagattgctctgccacgagaaagcaacattacagttctcataaagctggggaccccgactctgctggcaaaaccctgttacatcgtcatttctaaaagacatataaccatgttgtccatcaagtctggagaaagaatagtctttacctttagctgccagagtcctgagaatcactttgtcatagagatccagaaaaatattgactgtatgtcaggcccatgtccttttggggaggttcagcttcagccctcgacatcgttgttgcctaccctcaacagaactttcatctgggatgtcaaagctcataagagcatcggtttagagctgcagttttccatccctcgcctgaggcagatcggtccgggtgagagctgcccagacggagtcactcactccatcagcggccgaatcgatgccaccgtggtcaggatcggaaccttctgcagcaatggcactgtgtcccggatcaagatgcaagaaggagtgaaaatggccttacacctcccatggttccaccccagaaatgtctccggcttcagcattgcaaaccgctcatctataaaacgtctgtgcatcatcgagtctgtgtttgagggtgaaggctcagcaaccctgatgtctgccaactacccagaaggcttccctgaggatgagctcatgacgtggcagtttgtcgttcctgcacacctgcgggccagcgtctccttcctcaacttcaacctctccaactgtgagaggaaggaggagcgggttgaatactacatcccgggctccaccaccaaccccgaggtgttcaagctggaggacaagcagcctgggaacatggcggggaacttcaacctctctctgcaaggctgtgaccaagatgcccaaagtccagggatcctccggctgcagttccaagttttggtccaacatccacaaaatgaaagcaataaaatctacgtggttgacttgagtaatgagcgagccatgtcactcaccatcgagccacggcccgtcaaacagagccgcaagtttgtccctggctgtttcgtgtgtctagaatctcggacctgcagtagcaacctcaccctgacatctggctccaaacacaaaatctccttcctttgtgatgatctgacacgtctgtggatgaatgtggaaaaaaccataagctgcacagaccaccggtactgccaaaggaaatcctactcactccaggtgcccagtgacatcctccacctgcctgtggagctgcatgacttctcctggaagctgctggtgcccaaggacaggctcagcctggtgctggtgccagcccagaagctgcagcagcatacacacgagaagccctgcaacaccagcttcagctacctcgtggccagtgccatacccagccaggacctgtacttcggctccttctgcccgggaggctctatcaagcagatccaggtgaagcagaacatctcggtgacccttcgcacctttgcccccagcttccaacaagaggcctccaggcagggtctgacggtgtcctttataccttatttcaaagaggaaggcgttttcacggtgacccctgacacaaaaagcaaggtctacctgaggacccccaactgggaccggggcctgccatccctcacctctgtgtcctggaacatcagcgtgcccagagaccaggtggcctgcctgactttctttaaggagcggagcggcgtggtctgccagacagggcgcgcattcatgatcatccaggagcagcggacccgggctgaggagatcttcagcctggacgaggatgtgctccccaagccaagcttccaccatcacagcttctgggtcaacatctctaactgcagccccacgagcggcaagcagctagacctgctcttctcggtgacacttaccccaaggactgtggacttgact

SEQ ID NO: 6024 - DNA, 954 bp, Homo Sapiens
gcgctcacgcacgtgctgtgccggccccggcgcggctgctgcgggcgccgtcggagcgcgtcccccgcctgcctgagcgacccctcgctgggtgagcacggtttcctgaacctcaagagctcgggcctgcgtctgcactatgtctcggctggacgaggtaacggacccctcatgctgtttctgcacggcttccctgagaactggttctcctggcgttaccagctccgggagttccagagccgcttccatgttgtggctgtggacttgcgaggctatggcccctcggatgcacctcgggatgtggactgctacacaatcgacctgctgctggtggacatcaaagatgtcatcctaggcctgggttactcgaagtgcatccttgtggcccatgactggggtgccctccttgcctggcatttctccatctactacccatccctggtcgagcggatggttgtggtcagtggtgcccccatgtcggtgtaccaagactattccctgcaccacatcagccagttcttccgttcccactacatgttcctgttccagctgccctggctgcccgagaagctgctgtctatgtctgactttcagattctgaagaccaccctcacccaccgcaagacaggcatcccatgcttgacccccagcgagctcgaggccttcctttataacttctcacagcctggtggcctcactgggcccctcaactactaccgaaacctcttcaggaacttccccctggaaccccaggagctgaccacacccacattgctgctgtggggggagaaggacacttacttggagctggggctggtggaagccatcggcagccgctttgtgccgggccgcttggaggcccacatcctgccaggcatagggcattggatcccacagagcaacccccaggagatgcaccagtacatgtgggccttcttgcaagacctgctggac

SEQ ID NO: 6025 - DNA, 621 bp, Homo Sapiens
accttgaggacctccctggacccaagcctggagatctacaagaagatgtttgaggtgaagcggcgggagcagctgttggcactgaagaacctggcacagctgaacgacatccaccagcagtacaagatccttgatgtcatgctcaaggggctctttaaggtgctggaggactcccggacagtgctcaccgctgctgatgtgctcccagatgggcccttcccccaggacgagaagctgaaggatgctttctcccacgtggtggagaacacggccttcttcggcgatgtggtgctgcgcttcccgaggattgtgcactattactttgaccacaactccaactggaacctcctcatccgctggggtatcagtttctgcaaccagacaggcgtcttcaaccaggggccccactcgcccatcctcagcctgatggcccaggagctggggatcagtgagaaagactccaacttccagaacccatttaaaatcgaccgcacagagttcattcccagcactgaccctttccagaaggccctgagagaagaagagaaacgccgaaagaaagaggagaagcggaaggagatccgaaaaggcccaaggatctccagatcccagtctgagtta

SEQ ID NO: 6026 - DNA, 516 bp, Homo Sapiens
accttcaagcaggaggagagggcagtgagagataggaatctcctccaggttcatgaccataatcagcccatcccgtggaaagtgcagtttaacttgggcaatagcagtcgtccgagcaatcagtgccgcaactccattcaagggaagcacctcatcacggatgaactcggctacgtttgcgagaggaaggatttgctggtaaatggctgctgtaatgtcaacgtccctagcacgaagcagtactgctgtgatggctgctggcccaacggctgctgcagcgcctatgagtactgtgtctcctgctgcctgcagcccaacaagcaacttctcctggagcgcttcctcaaccgggcagccgtggcattccagaacctcttcatggcagtcgaagatcactttgagttgtgcctggccaaatgcaggacctcatctcagagcgtgcagcatgagaacacctaccgggaccccatagcaaagtattgctatggagaaagcccgcccgagctcttccccgct

SEQ ID NO: 6027 - DNA, 441 bp, Homo Sapiens
cggaagaaccggccggcgggcgccatccactcgccttacaaggacggcagcagcaacaactcggagagatggcagcaccagatcaaggaggtactggcctccagccaggaggccctggtggtcaccgagcgcaagtacctcaagagtgactggtgcaagacgcagccgctgcggcagacggtgagcgaggagggctgccggagccgcaccatcctcaaccgcttctgctacggccagtgcaactccttctacatcccgcggcacgtgaagaaggaggaggagtccttccagtcctgcgccttctgcaagccccagcgcgtcacctccgtcctcgtggagctcgagtgccccggcctggacccacccttccgactcaagaaaatccagaaggtgaagcagtgccggtgcatgtccgtgaacctgagcgactcggacaagcag

SEQ ID NO: 6028 - DNA, 306 bp, Homo Sapiens
ctttcacctcccaccatgaacctgaggcctcccaagtcatgtggaaatgtcttttattgggtgctggttcttaactctggacttctctacaagttttgtcaaactatcaaatgcagagcaaattggaggcctgccagagcacccagagggtggaatgaagcaacagagaggcatcaggaaaggagaacacagatggagacagagatgggaggcataagcaccacctactggcacaggctgtgcacttgcacggataggagagctgaaaagttggtcatggatggaaataactgctggtttcacaaa

SEQ ID NO: 6029 - DNA, 645 bp, Homo Sapiens
tggatatgcaaaaaatggttcccctacttcttggtgaggttcactgtgatatacaacgaacagatggcaagcaagaagcgggagctcttcagtaacctgcaggagtttgcgggcccctccgggaaactctccctgctggaagtgggctgtggcacgggggccaacttcaagttctacccacctgggtgcagggtgacctgtattgaccccaaccccaactttgagaagtttttgatcaagagcattgcagagaaccgacacctgcagtttgagcgctttgtggtagctgccggggagaacatgcaccaggtggctgatggctctgtggatgtggtggtctgcaccctggtgctgtgctctgtgaagaaccaggagcggattctccgcgaggtgtgcagagtgctgagaccgggaggggctttctatttcatggagcatgtggcagctgagtgttcgacttggaattacttctggcaacaagtcctggatcctgcctggcaccttctgtttgatgggtgcaacctgaccagagagagctggaaggccctggagcgggccagcttctctaagctgaagctgcagcacatccaggccccactgtcctgggagttggtgcgccctcatatctatggatatgctgtgaaa

SEQ ID NO: 6030 - DNA, 1215 bp, Homo Sapiens
cagaattgcctcaaaaagagtctagaagatgttgtcattgacatccagtcatctctttctaagggaatcagaggcaatgagcccatatatacttcaactcaagaagactgcattaattcttgctgttcaacaaaaaacatatcaggggacaaagcatgtaacttgatgatcttcgacactcgaaaaacagctagacaacccaactgctacctatttttctgtcccaacgaggaagcctgtccattgaaaccagcaaaaggacttatgagttacaggataattacagattttccatctttgaccagaaatttgccaagccaagagttaccccaggaagattctctcttacatggccaattttcacaagcagtcactcccctagcccatcatcacacagattattcaaagcccaccgatatctcatggagagacacactttctcagaagtttggatcctcagatcacttggagaaactatttaagatggatgaagcaagtgcccagctccttgcttataaggaaaaaggccattctcagagttcacaattttcctctgatcaagaaatagctcatctgctgcctgaaaatgtgagtgcgctcccagctacggtggcagttgcttctccacataccacctcggctactccaaagcccgccacccttctacccaccaatgcttcagtgacaccttctgggacttcccagccacagctggccaccacagctccacctgtaaccactgtcacttctcagcctcccacgaccctcatttctacagtttttacacgggctgcggctacactccaagcaatggctacaacagcagttctgactaccacctttcaggcacctacggactcgaaaggcagcttagaaaccataccgtttacagaaatctccaacctaactttgaacacagggaatgtgtataaccctactgcactttctatgtcaaatgtggagtcttccactatgaataaaactgcttcctgggaaggtagggaggccagtccaggcagttcctcccagggcagtgttccagaaaatcagtacggccttccatttgaaaaatggcttcttatcgggtccctgctttttggtgtcctgttcctggtgataggcctcgtcctcctgggtagaatcctctcggaatcactccgcaggaaacgttactcaagactggattatttgatcaatgggatctatgtggacatc

SEQ ID NO: 6031 - DNA, 1218 bp, Homo Sapiens
ctgcttgctccagttttccggacactatctatcttgactaatcagtctaattgctggttatgtgaacatctagataatgcagaacaacccgaactagtttttgttcctgccagtgcaagcacctggtggacctattctggacaatggatgtatgaaagggtgtggtatccacaagcagaagtacagaatcactctacttcctcctatcgtaaagtgacttggcactgggaagcctccatggaagctcaaggtctatcctttgctcaagtaaggttattggagggaaatttttctctttgcgtagaaaataaaaatggcagtggacccttcctaggtaatatacctaaacaatactgtaatcaaatactatggtttgattctacagatggcaccttcatgccctctatagatgttacaaatgaatccaggaacgatgatgatgatacaagtgtttgcctaggcactagacaatgttcctggtttgcaggttgcacaaaccggacctggaacagctcagctgttcccttgattggtctgcccaatacccaagactacaaatgggtagatcgaaattctggattgacctggtcaggtaatgacacctgtctctatagctgccaaaaccaaaccaaaggccttctgtaccagctatttcgcaacctattttgctcttatggcctgacagaggcacatgggaaatggagatgtgcagatgccagcataactaatgacaaaggtcatgatggacaccggacccccacctggtggctcacaggttccaatctgaccttgtctgtgaacaactctggcctcttttttttgtgcggcaatggggtgtacaaagggtttccacctaaatggtctgggcgatgtggacttgggtatcttgtaccttccctcaccagatacctcaccttaaatgctagccaaattacaaacctgagatccttcattcataaagtaacaccgcatagatgcacccaaggagacacagacaatccacctctgtattgcaaccccaaggacaattcaacaataagggccctttttccaagtttgggaacttatgatttagaaaaggcaattctaaacatttccaaagcaatggaacaggaattcagtgccactaagcagaccttggaagcacaccaatcaaaagttagcagtttagcctctgcatcccgaaaggatcatgtcttggatataccgaccacccaa

SEQ ID NO: 6032 - DNA, 1500 bp, Homo Sapiens
attggttttcgctttgcttcatacatcaataatgatatggtgctgcagaaggagcctgctggggcagtgatatggggcttcggtacacctggagccacagtgaccgtgaccctgcgccaaggtcaggaaaccatcatgaagaaagtgaccagtgtaaaagctcactctgatacgtggatggtggtactggatcctatgaagcctggaggacctttcgaagtgatggcacaacagactttggagaaaataaacttcaccctgagagttcatgacgtcctgtttggagatgtctggctctgtagtgggcagagtaacatgcagatgactgtgttacagatatttaatgctacaagggagttgtctaacactgcggcatatcagtctgtccgcatcctctctgtctctcccattcaagcagagcaggagctggaggaccttgttgcggttgacttgcagtggtctaagcccacctcagaaaacttaggccatggatatttcaagtacatgtcagcagtgtgctggctctttggacgtcacctttatgacactctgcagtatcccatcgggctgatcgcctccagctggggcgggacacccattgaagcctggtcatctggacggtcactgaaagcctgtggggtccctaaacaagggtccattccatacgattctgtaactggtcccagtaagcactctgttctctggaatgccatgatccatccactgtgcaatatgactctgaaaggggtagtatggtaccagggggagtccaatataaattataacacggatctgtacaattgcacattccctgcactcatcgaagactggcgtgaaaccttccaccgtggttcccaggggcagacggagcgtttcttcccatttggacttgtccagttatcttcagatttgtctaagaagagctcagacgatggatttccccagatccgttggcatcaaacagcagacttcggctatgtccccaacccaaagatgcccaatactttcatggctgtagctatggatctctgtgatagagactcgccttttggcagcatccaccctcgagataaacagactgtggcttatcggctgcatttgggggcccgtgctctggcttatggtgagaagaatttgacctttgaaggaccactgcctgagaagatagaactcttggctcacaaggggctgctcaatctcacatattaccagcaaatccaggtgcagaaaaaggacaacaagatatttgagatctcctgttgcagtgaccatcgatgcaagtggcttccagcttctatgaacaccgtctccacccagtccctgaccctggcgatcgattcttgtcatggcactgtggttgctctccgctatgcttggaccacgtggccttgtgaatataagcagtgtcccctataccaccccagtagtgccctgccagcccctccattcattgctttcattacagaccagggtcctggacatcagagcaatgttgctaaa

SEQ ID NO: 6033 - DNA, 1386 bp, Homo Sapiens
gggaagctgctggtagtgcccatggatgggagccactggttcaccatgcagtcggtggtggagaaactcatcctcagggggcatgaggtggtcgtagtcatgccagaggtgagttggcaactgggaagatcactgaattgcacagtgaagacttactcaacctcatacactctggaggatcaggaccgggagttcatggtttttgccgatgctcgctggacggcaccattgcgaagtgcattttctctattaacaagttcatccaatggtatttttgacttatttttttcaaattgcaggagtttgtttaatgaccgaaaattagtagaatacttaaaggagagttgttttgatgcagtgtttctcgatccttttgatgcctgtggcttaattgttgccaaatatttctccctcccctctgtggtcttcgccaggggaatattttgccactatcttgaagaaggtgcacagtgccctgctcctctttcctatgtccccagacttctcttagggttctcagacgccatgactttcaaggagagagtatggaaccacatcatgcacttggaggaacatttattttgcccctattttttcaaaaatgtcttagaaatagcctctgaaattctccaaacccctgtcacggcatatgatctctacagccacacatcaatttggttgttgcgaactgactttgttttggagtatcccaaacccgtgatgcccaatatgatcttcattggtggtatcaactgtcatcagggaaagccagtgcctatggaatttgaagcctacattaatgcttctggagaacatggaattgtggttttctctttgggatcaatggtctcagaaattccagagaagaaagctatggcaattgctgatgctttgggcaaaatccctcagacagtcctgtggcggtacactggaacccgaccatcgaatcttgcgaacaacacgatacttgttaagtggctaccccaaaacgatctgcttggtcacccgatgacccgtgcctttatcacccatgctggttcccatggtgtttatgaaagcatatgcaatggcgttcccatggtgatgatgcccttgtttggtgatcagatggacaatgcaaagcgcatggagactaagggagctggagtgaccctgaatgttctggaaatgacttctgaagatttagaaaatgctctaaaagcagtcatcaatgacaaaagttacaaggagaacatcatgcgcctctccagccttcacaaggaccgcccggtggagccgctggacctggccgtgttctgggtggagtttgtgatgaggcacaagggcgcgccacacctgcgccccgcagcccacgacctcacctggtaccagtaccattccttggac

SEQ ID NO: 6034 - DNA, 1386 bp, Homo Sapiens
gggaagctgctggtagtgcccatggatgggagtcactggttcaccatgcagtcggtggtggagaaacttatcctcagggggcatgaggtggttgtagtcatgccagaggtgagttggcaactgggaaaatcactgaattgcacagtgaagacttactcaacctcatacactctggaggatctggaccgggaattcatggatttcgccgatgctcaatggaaagcacaagtacgaagtttgttttctctatttctgagttcatccaatggtttttttaacttatttttttcgcattgcaggagtttgtttaatgaccgaaaattagtagaatacttaaaggagagttcttttgatgcggtgtttcttgatccttttgatgcctgtggcttaattgttgccaaatatttctccctcccctctgtggtcttcgccaggggaatagcttgccactatcttgaagaaggtgcacagtgccctgctcctctttcctatgtccccagaattctcttagggttctcagatgccatgactttcaaggagagagtacggaaccacatcatgcacttggaggaacatttattttgccagtatttttccaaaaatgccctagaaatagcctctgaaattctccaaacacctgtcacagcatatgatctctacagccacacatcaatttggttgttgcgaacagactttgttttggactatcccaaacccgtgatgcccaatatgatcttcattggtggtatcaactgccatcagggaaagccattgcctatggaatttgaagcctacattaatgcttctggagaacatggaattgtggttttctctttgggatcaatggtctcagaaattccagagaagaaagctatggcaattgctgatgctttgggcaaaatccctcagacagtcctgtggcggtacactggaacccgaccatcgaatcttgcgaacaacacgatacttgttaagtggctaccccaaaacgatctgcttggtcacccgatgacccgtgcctttatcacccatgctggttcccatggtgtttatgaaagcatatgcaatggcgttcccatggtgatgatgcccttgtttggtgatcagatggacaatgcaaagcgcatggagactaagggagctggagtgaccctgaatgttctggaaatgacttctgaagatttagaaaatgctctaaaagcagtcatcaatgacaaaagttacaaggagaacatcatgcgcctctccagccttcacaaggaccgcccggtggagccgctggacctggccgtgttctgggtggagtttgtgatgaggcacaagggcgcgccacacctgcgccccgcagcccacgacctcacctggtaccagtaccattccttggac

SEQ ID NO: 6035 - DNA, 1278 bp, Homo Sapiens
gctgtcattgactggcccacagaggagggcaaggaagtatgggattatgtgacggtccgcaaggatgcctacatgttctggtggctctattatgccaccaactcctgcaagaacttctcagaactgcccctggtcatgtggcttcagggcggtccaggcggttctagcactggatttggaaactttgaggaaattgggccccttgacagtgatctcaaaccacggaaaaccacctggctccaggctgccagtctcctatttgtggataatcccgtgggcactgggttcagttatgtgaatggtagtggtgcctatgccaaggacctggctatggtggcttcagacatgatggttctcctgaagaccttcttcagttgccacaaagaattccagacagttccattctacattttctcagagtcctatggaggaaaaatggcagctggcattggtctagagctttataaggccattcagcgagggaccatcaagtgcaactttgcgggggttgccttgggtgattcctggatctcccctgttgattcggtgctctcctggggaccttacctgtacagcatgtctcttctcgaagacaaaggtctggcagaggtgtctaaggttgcagagcaagtactgaatgccgtaaataaggggctctacagagaggccacagagctgtgggggaaagcagaaatgatcattgaacagaacacagatggggtgaacttctataacatcttaactaaaagcactcccacgtctacaatggagtcgagtctagaattcacacagagccacctagtttgtctttgtcagcgccacgtgagacacctacaacgagatgccttaagccagctcatgaatggccccatcagaaagaagctcaaaattattcctgaggatcaatcctggggaggccaggctaccaacgtctttgtgaacatggaggaggacttcatgaagccagtcattagcattgtggacgagttgctggaggcagggatcaacgtgacggtgtataatggacagctggatctcatcgtagataccatgggtcaggaggcctgggtgcggaaactgaagtggccagaactgcctaaattcagtcagctgaagtggaaggccctgtacagtgaccctaaatctttggaaacatctgcttttgtcaagtcctacaagaaccttgctttctactggattctgaaagctggtcatatggttccttctgaccaaggggacatggctctgaagatgatgagactggtgactcagcaagaa

SEQ ID NO: 6036 - DNA, 570 bp, Homo Sapiens
caaagtccaatgactgtgctgtgctccatagactggttcatggtcacagtgcaccccttcatgctaaacaacgatgtgtgtgtacactttcatgaactacacttgggcctgggttgccccccaaaccatgttcagccacacgcctaccagttcacctaccgtgttactgaatgtggcatcagggccaaagctgtctctcaggacatggttatctacagcactgagatacactactcttctaagggcacgccatctaagtttgtgatcccagtgtcatgtgctgccccccaaaagtccccatggctcaccaagccctgctccatgagagtagccagcaagagcagggccacagcccagaaggatgagaaatgctacgaggtgttcagcttgtcacagtccagtcaaaggcccaactgcgattgtccaccttgtgtcttcagtgaagaagagcatacccaggtcccttgtcaccaagcaggggctcaggaggctcaacctctgcagccatctcactttcttgatatttctgaggattggtctcttcacacagatgatatgattgggtccatg

SEQ ID NO: 6037 - DNA, 156 bp, Homo Sapiens
atggggtttatattttcaaaatctatgaatgaaagcatgaaaaatcaaaaggagttcatgcttatgaatgctcgacttcagctggaaaggcagctcatcatgcagagtgaaatgagggaaagacaaatggccatgcagattgcgtggtctcgggaa

SEQ ID NO: 6038 - DNA, 576 bp, Homo Sapiens
accaacgtcaccgctgccgtccaggatgccggcctggcccacgaaggcgagggcgaggaggagaccgaaaacaacgacagcgagaccgcggagaactacgctccgcctgaaaccgaggatgtttcaaataggaatgtcgtcaaagaagtagaattcggaatgtgcaccgttacatgtggtattggtgttagagaagttatattaacaaatggatgccctggtggtgaatccaagtgtgttgtacgggtagaagaatgccgtggaccaacagattgtggctggggtaaaccaatttcagaaagtcttgaaagtgttagattggcatgtattcacacatctcccttaaatcgtttcaaatatatgtggaaacttctaagacaagaccaacaatccattatacttgtaaatgattcagcaatcctagaagtacgcaaggaaagtcaccccttggctttcgagtgtgacacactggataataatgaaatagtagcaactattaaattcacagtctatacgagcagtgaattgcagatgagaagatcaagcctaccagccactgatgcagccctaattttt

SEQ ID NO: 6039 - DNA, 306 bp, Homo Sapiens
gccgtgatcaccggggcttgtgacaaggactcccaatgtggtggaggcatgtgctgtgctgtcagtatctgggtcaagagcataaggatttgcacacctatgggcaaactgggagacagctgccatccactgactcgtaaaaacaattttggaaatggaaggcaggaaagaagaaagaggaagagaagcaaaaggaaaaaggaggttccattttttgggcggaggatgcatcacacttgcccatgtctgccaggcttggcctgtttacggacttcatttaaccgatttatttgtttagcccaaaag

SEQ ID NO: 6040 - DNA, 567 bp, Homo Sapiens
aagaatatctggaaacgggcattgcctgcgaggctggccgagaaatcccgtgccgaggaggcgggcgcgcccggcggcccccggcagccccgagcagaccgctgcccgccgcctccgcggacgctgccccccggcgcctgccaggccgcgcgctgtcaggcggactccgagtgcccgcggcaccggcgctgctgctacaacggatgcgcctacgcctgcctagaagctgtgccgcccccgccagtcttagactggctggtgcagccgaaacctcgatggcttggtggcaatggctggctcctggatggccctgaggaggtgttacaagcagaggcgtgcagcaccacggaggatggggccgaacccctgctctgtccctcgggctatgagtgccacatcctgagcccaggtgacgtggccgaaggtatccccaaccgtgggcagtgcgtcaagcagcgccggcaagcagatgggcgaatcctacgacacaaactttacaaagaatatccagaaggtgactcaaagaatgtggcagaacctggaaggggacaacagaagcactttcag

SEQ ID NO: 6041 - DNA, 189 bp, Homo Sapiens
gagcagaaggagcttgacctcatggacctcgtaggggaagacagaaagtggatgatggcgaggaagctgatgcaggtgaacgacactctgacttccgaagatgccggactccggaacagcaagaactgcaccgaaccagccctgcatgaattccccaatgacatcttcacaaacgaggatagaagacaa

SEQ ID NO: 6042 - DNA, 2337 bp, Homo Sapiens
ttctccgacgagaccctggacaaagtgcccaagtcagagggctactgcagccgtatcctgcgcgcccagggcacgcggcgcgagggctacaccgagttcagcctccgcgtggagggcgaccccgacttctacaagccgggaaccagctaccgcgtaacactttcagctgctcctccctcctacttcagaggattcacattaattgccctcagagagaacagagagggtgataaggaagaagaccatgctgggaccttccagatcatagacgaagaagaaactcagtttatgagcaattgccctgttgcagtcactgaaagcactccacggaggaggacccggatccaggtgttttggatagcaccaccagcgggaacaggctgcgtgattctgaaggccagcatcgtacaaaaacgcattatttattttcaagatgagggctctctgaccaagaaactttgtgaacaagattccacatttgatggggtgactgacaaacccatcttagactgctgtgcctgcggaactgccaagtacagactcacattttatgggaattggtccgagaagacacacccaaaggattaccctcgtcgggccaaccactggtctgcgatcatcggaggatcccactccaagaattatgtactgtgggaatatggaggatatgccagcgaaggcgtcaaacaagttgcagaattgggctcacccgtgaaaatggaggaagaaattcgacaacagagtgatgaggtcctcaccgtcatcaaagccaaagcccagtggccagcctggcagcctctcaacgtgagagcagcaccttcagctgaattttccgtggacagaacgcgccatttaatgtccttcctgaccatgatgggccctagtcccgactggaacgtaggcttatctgcagaagatctgtgcaccaaggaatgtggctgggtccagaaggtggtgcaagacctgattccctgggacgctggcaccgacagcggggtgacctatgagtcacccaacaaacccaccattccccaggagaaaatccggcccctgaccagcctggaccatcctcagagtcctttctatgacccagagggtgggtccatcactcaagtagccagagttgtcatcgagagaatcgcacggaagggtgaacaatgcaatattgtacctgacaatgtcgatgatattgtagctgacctggctccagaagagaaagatgaagatgacacccctgaaacctgcatctactccaactggtccccatggtccgcctgcagctcctccacctgtgacaaaggcaagaggatgcgacagcgcatgctgaaagcacagctggacctcagcgtcccctgccctgacacccaggacttccagccctgcatgggccctggctgcagtgacgaagacggctccacctgcaccatgtccgagtggatcacctggtcgccctgcagcatctcctgcggcatgggcatgaggtcccgggagaggtatgtgaagcagttcccggaggacggctccgtgtgcacgctgcccactgaggaaacggagaagtgcacggtcaacgaggagtgctctcccagcagctgcctgatgaccgagtggggcgagtgggacgagtgcagcgccacctgcggcatgggcatgaagaagcggcaccgcatgatcaagatgaaccccgcagatggctccatgtgcaaagccgagacatcacaggcagagaagtgcatgatgccagagtgccacaccatcccatgcttgctgtccccatggtccgagtggagtgactgcagcgtgacctgcgggaagggcatgcgaacccgacagcggatgctcaagtctctggcagaacttggagactgcaatgaggatctggagcaggtggagaagtgcatgctccctgaatgccccattgactgtgagctcaccgagtggtcccagtggtcggaatgtaacaagtcatgtgggaaaggccacgtgattcgaacccggatgatccaaatggagcctcagtttggaggtgcaccctgcccagagactgtgcagcgaaaaaagtgccgcatccgaaaatgccttcgaaatccatccatccaaaagctacgctggagggaggcccgagagagccggcggagtgagcagctgaaggaagagtctgaaggggagcagttcccaggttgtaggatgcgcccatggacggcctggtcagaatgcaccaaactgtgcggaggtggaattcaggaacgttacatgactgtaaagaagagattcaaaagctcccagtttaccagctgcaaagacaagaaggagatcagagcatgcaatgttcatccttgt

SEQ ID NO: 6043 - DNA, 843 bp, Homo Sapiens
tcctcaccctgcatcatggaacccagagacttaccacccaagcctgggctggtgggacaccgaggggcccccatgctggctcccgagaacaccctgatgtccttgcggaagacagctgaatgcggagctactgtgtttgagactgatgtgatggtcagctccgatggggtccccttcctcatgcatgatgagcacctcagcaggaccacgaatgtagcctctgtattcccaacccgaatcacagcccacagcagtgacttctcctggactgaactgaagagactcaatgctggatcctggttcctagagaggcgacccttctggggggccaaaccgctggcaggccctgatcagaaagaggctgagagtcagacggtaccagcattagaagagctattggaggaagctgcagccctcaacctttccatcatgttcgacttgcgccgacccccacagaaccacacatactatgacacttttgtgatccagacattggagactgtgctgaatgcaagggtgccccaagccatggtcttttggctaccagatgaagatcgggctaatgtccaacgacgggcacctggaatgcgccagatatatggacgtcagggaggcaacagaacggagaggccccagtttcttaacctcccctatcaagatctgccactattggatatcaaggcattgcataaggataatgtctcggtgaacctatttgtagtgaacaagccctggctcttctctctgctttggtgtgcaggggtggattcggtcaccaccaacgactgccagctgctgcagcagatgcgttaccctatctggcttattacccctcaaacctac

SEQ ID NO: 6044 - DNA, 579 bp, Homo Sapiens
gccaagaccggtgcggagctcgtgacctgcgggtcggtgctgaagctgctcaatacgcaccaccgcgtgcggctgcactcgcacgacatcaaatacggatccggcagcggccagcaatcggtgaccggcgtagaggcgtcggacgacgccaatagctactggcggatccgcggcggctcggagggcgggtgcccgcgcgggtccccggtgcgctgcgggcaggcggtgaggctcacgcatgtgcttacgggcaagaacctgcacacgcaccacttcccgtcgccgctgtccaacaaccaggaggtgagtgcctttggggaagacggcgagggcgacgacctggacctatggacagtgcgctgctctggacagcactgggagcgtgaggctgctgtgcgcttccagcatgtgggcacctctgtgttcctgtcagtcacgggtgagcagtatggaagccccatccgtgggcagcatgaggtccacggcatgcccagtgccaacacgcacaatacgtggaaggccatggaaggcatcttcatcaagcctagtgtggagccctctgcaggtcacgatgaactc

SEQ ID NO: 6045 - DNA, 153 bp, Homo Sapiens
acagcacgcttcatggccttcctgaaggccacggaggcacagctgtacgtggaccagcacgtgcaggacgacacgctgcacaatgtctcgcttccgccggaagtggcatacttcacctacgccagggacaagtggtggccttcagaccctcag

SEQ ID NO: 6046 - DNA, 270 bp, Homo Sapiens
aagaccctgtgctccatggaagaagccatcaatgagaggatccaggaggtcgccggctccctaatatttagggcaataagcagcattggcctggagtgccagagcgtcacctccaggggggacctggctacttgcccccgaggcttcgccgtcaccggctgcacttgtggctccgcctgtggctcgtgggatgtgcgcgccgagaccacatgtcactgccagtgcgcgggcatggactggaccggagcgcgctgctgtcgtgtgcagccc

SEQ ID NO: 6047 - DNA, 1065 bp, Homo Sapiens
gaatctcctatagatccacagcctctcagcttcaaagaacccccgctcttgcttggtgttctgcatccaaatacgaagctgcgacaggcagaaaggctgtttgaaaatcaacttgttggaccggagtccatagcacatattggggatgtgatgtttactgggacagcagatggccgggtcgtaaaacttgaaaatggtgaaatagagaccattgcccggtttggttcgggcccttgcaaaacccgagatgatgagcctgtgtgtgggagacccctgggtatccgtgcagggcccaatgggactctctttgtggccgatgcatacaagggactatttgaagtaaatccctggaaacgtgaagtgaaactgctgctgtcctccgagacacccattgaggggaagaacatgtcctttgtgaatgatcttacagtcactcaggatgggaggaagatttatttcaccgattctagcagcaaatggcaaagacgagactacctgcttctggtgatggagggcacagatgacgggcgcctgctggagtatgatactgtgaccagggaagtaaaagttttattggaccagctgcggttcccgaatggagtccagctgtctcctgcagaagactttgtcctggtggcagaaacaaccatggccaggatacgaagagtctacgtttctggcctgatgaagggcggggctgatctgtttgtggagaacatgcctggatttccagacaacatccggcccagcagctctggggggtactgggtgggcatgtcgaccatccgccctaaccctgggttttccatgctggatttcttatctgagagaccctggattaaaaggatgatttttaagctctttagtcaagagacggtgatgaagtttgtgccgcggtacagcctcgtcctagaactcagcgacagcggtgccttccggagaagcctgcatgatcccgatgggctggtggccacctacatcagcgaggtgcacgaacacgatgggcacctgtacctgggctctttcaggtcccccttcctctgcagactcagcctccaggctgtt

SEQ ID NO: 6048 - DNA, 1170 bp, Homo Sapiens
atgaacgggacgcggaactggtgtaccctggtggacgtgcacccagaggaccaggcggcgggcagcgtggacattctcaggctgactctccagggtgaactgacaggagatgaacttgaacacatagcccagaaggcgggcaggaagacctatgccatggtgtccagccactcagctggtcattctctggcttcagaactggtggagtcccatgatggacatgaggagatcattaaggtgtacttgaaggggaggtctggagacaagatgattcacgagaagaatattaaccagctgaagagtgaggtccagtacatccaggaggccaggaactgcctacagaagctccgggaggatataagtagcaagcttgacaggaacctaggagattctctccatcgacaggagatacaggtggtgctagaaaagccaaatggctttagtcagagtcccacagccctgtacagcagcccacctgaggtggacacctgtataaatgaggatgttgagagcttgaggaagacggtgcaggacttgctggccaagcttcaggaggccaagcggcaacaccagtcagactgtgtggcttttgaggtcacactcagccggtaccagagggaagcagaacaaagtaatgtggcccttcagagagaggaggacagagtggagcagaaagaggcagaagtcggagagctgcagaggcgcttgctagggatggagacggagcatcaggccttactggcgaaagtgagggaaggggaggtggccctagaggaacttcggagcaacaatgctgactgccaagcagaacgagaaaaggctgctaccctggaaaaggaagtggccgggttgcgggagaagatccaccacttggatgacatgctcaagagccagcagcggaaagtccggcaaatgatagagcagctccagaattcaaaagctgtgatccagtcaaaggacgccaccatccaggagctcaaggagaaaatcgcctatctggaggcagagaatttagagatgcatgaccggatggaacacctgatagaaaaacaaatcagtcatggcaacttcagcacccaggcccgggccaagacagagaacccgggcagtattaggatatccaagccgcctagcccgaagcccatgcctgtcatccgagtggtggaaacc

SEQ ID NO: 6049 - DNA, 711 bp, Homo Sapiens
cagtttggaggcctgcccgtgcccctggaccagaccctgcccttgaatgtgaatccagccctgcccttgagtcccacaggtcttgcaggaagcttgacaaatgccctcagcaatggcctgctgtctgggggcctgttgggcattctggaaaaccttccgctcctggacatcctgaagcctggaggaggtacttctggtggcctccttgggggactgcttggaaaagtgacgtcagtgattcctggcctgaacaacatcattgacataaaggtcactgacccccagctgctggaacttggccttgtgcagagccctgatggccaccgtctctatgtcaccatccctctcggcataaagctccaagtgaatacgcccctggtcggtgcaagtctgttgaggctggctgtgaagctggacatcactgcagaaatcttagctgtgagagataagcaggagaggatccacctggtccttggtgactgcacccattcccctggaagcctgcaaatttctctgcttgatggacttggccccctccccattcaaggtcttctggacagcctcacagggatcttgaataaagtcctgcctgagttggttcagggcaacgtgtgccctctggtcaatgaggttctcagaggcttggacatcaccctggtgcatgacattgttaacatgctgatccacggactacagtttgtcatcaaggtc

SEQ ID NO: 6050 - DNA, 1263 bp, Homo Sapiens
gtgccgttctttcctcagcaatctggaacaccgggtatggctagtttgagccttgagacaatgagacagttgggaagtctgcagagattaaacacactttctcagtattctagatacggctttggaaaatcatttaattctttgtggatgcacggtctcctcccaccacattcctctcttccatggatgaggccaagagaacatgaaactcaacagtatgaatattctttgcctgtgcatcccccacctctcccatcacagccatccttgaagcctcaacagccaggactgaaaccttttctccagtctgctgctgcaaccaccaaccaggccacagcactgaaagaagcacttcagcctccaattcacctgggacatctgcccttgcaggaaggagaactgcctctggttcagcagcaggtggcaccatcagataagccaccaaagcctgagctcccaggagtagattttgctgatccacaaggtccatcactcccaggaatggattttcctgatccacaaggtccatcactcccaggattggattttgctgatccacaaggttcaacaattttccaaatagcccgtttgatttctcacggaccaatgccacaaaataaacaatctccactttatccaggaatgttgtacgtgccttttggagcaaatcaattgaatgcccctgccagacttggcatcatgagttcagaagaagtggcaggcgggagagaagacccaatggcctatggagccatgtttccaggatttggaggcatgaggcccggctttgagggaatgccccacaacccagctatgggcggtgacttcactctggaatttgactccccagtggctgccaccaaaggccctgagaacgaagaaggaggtgcacaaggctcccctatgccggaggccaacccagacaatctagaaaacccagctttccttacagagctagaacctgctccccacgcagggctccctgctctccctaaggatgacattcccggcctgccaaggagcccttcagggaagatgaagggactccccagcgtcaccccagcagctgctgacccactgatgacccctgaattagctgatgtttataggacctacgatgctgacatgaccacatccgtggatttccaggaagaagcaaccatggataccacgatggccccaaactctctgcaaacatccatgccaggaaacaaagcccaggagcccgagatgatgcatgacgcatggcatttccaagagccc

SEQ ID NO: 6051 - DNA, 276 bp, Homo Sapiens
tatggcttcaaggccaccttcaattatgaaaactgcttgaagaaggtgagtctgctgctgaccaacacttttgaccttgaagatggctttttgacagccagcaacctggagcaggtgaagggctacctcgcatctgcctacccaagcaaatacagcgagatgttcccgcaaatcaaaaactgcagcttggaatcggagctagacacggccgtccagggcactggcctggcattcatcgtctatacagaggccattaaaaacatggaggtgtcccag

SEQ ID NO: 6052 - DNA, 408 bp, Homo Sapiens
tcggaggtgcccggggctgctgctgagggatcgggagggagtggggtcggcataggagatcgcttcaagattgaggggcgtgcagttgttccaggggtgaagcctcaggactggatctcggcggcccgagtgctggtagacggagaagagcacgtcggtttccttaagacagatgggagttttgtggttcatgatataccttctggatcttatgtagtggaagttgtatctccagcttacagatttgatcccgttcgagtggatatcacttcgaaaggaaaaatgagagcaagatatgtgaattacatcaaaacatcagaggttgtcagactgccctatcctctccaaatgaaatcttcaggtccaccttcttactttattaaaagggaatcgtggggctggacagac

SEQ ID NO: 6053 - DNA, 378 bp, Homo Sapiens
aagccttttatgctcagcattcagagagaagaatcgacctgcactgccatccacacagatatcatggacgactggctggactgtgccttcacctgtggtgtgcactgccacggtcaggggaagtacccgtgtcttcaggtgtttgtgaacctcagccatccaggtcagaaagctctcctacattataatgaagaggctgtccagataaatcccaagtgcttttacacacctaagtgccaccaagatagaaatgatttgctcaacagtgctctggacataaaagaattcttcgatcacaaaaatggaacccccttttcatgcttctacagtccagccagccaatctgaagatgtcattcttataaaaaagtatgaccaa

SEQ ID NO: 6054 - DNA, 336 bp, Homo Sapiens
ttccctctaatctgcgaaagcaaatcagttgccggcctaaccttgacctatgatggaaataattcagtggcatctcatgtagatgtaccactttcttattgcaactcagagtgcaattgtgatgaaagtcagtgggaaccagtctgtgggaacaatggaataacttacctgtcaccttgtctagcaggatgcaaatcctcaagtggtattaaaaagcatacagtgttttataactgtagttgtgtggaagtaactggtctccagaacagaaattactcagcacacttgggtgaatgcccaagagataatacttgtacaaggaaatttttcatctat

SEQ ID NO: 6055 - DNA, 645 bp, Homo Sapiens
ggagggctgctgaagtatcaaactaatttagatacccaccctcccggctgcatcagtcttaaccgaaccagctctcagaatatttccttaccagagtatttctcagaacattttcatgaacctttccctgaaggattttcaaaaccggcagagtttacccagcacaaatttgtgaagatttgtatggaagagcccagattccaagctaattttccacagacttggctttggatttctggacctttgtgcctgtactgtgccgaaagactttacaggtatatccggagcaataagccagtcaccatcatttcggtcataagtcatccctcagatgtcatggaaatccgaatggtcaaagaaaattttaaagcaagacctggtcagtatattactctacattgtcccagtgtatctgcattagaaaatcatccatttaccctcacaatgtgtccaactgaaaccaaagcaacatttggggttcatcttaaaatagtaggagactggacagaacgatttcgagatttactactgcctccatctagtcaagactccgaaattctgcccttcattcaatctagaaattatcccaagctgtatattgatggtccttttggaagtccatttgaggaatcactgaactatgag

SEQ ID NO: 6056 - DNA, 465 bp, Homo Sapiens
ctgtccttcaccctggaggaggaggatatcacagggacctggtacgtgaaggccatggtggtcgataaggactttccggaggacaggaggcccaggaaggtgtccccagtgaaggtgacagccctgggcggtgggaagttggaagccacgttcaccttcatgagggaggatcggtgcatccagaagaaaatcctgatgcggaagacggaggagcctggcaaatacagcgcctatgggggcaggaagctcatgtacctgcaggagctgcccaggagggaccactacatcttttactgcaaagaccagcaccatgggggcctgctccacatgggaaagcttgtgggtaggaattctgataccaaccgggaggccctggaagaatttaagaaattggtgcagcgcaagggactctcggaggaggacattttcacgcccctgcagacgggaagctgcgttcccgaacac

SEQ ID NO: 6057 - DNA, 495 bp, Homo Sapiens
tggagcaataattatgcggtggactgccctcaacactgtgacagcagtgagtgcaaaagcagcccgcgctgcaagaggacagtgctcgacgactgtggctgctgccgagtgtgcgctgcagggcggggagaaacttgctaccgcacagtctcaggcatggatggcatgaagtgtggcccggggctgaggtgtcagccttctaatggggaggatccttttggtgaagagtttggtatctgcaaagactgtccctacggcaccttcgggatggattgcagagagacctgcaactgccagtcaggcatctgtgacagggggacgggaaaatgcctgaaattccccttcttccaatattcagtaaccaagtcttccaacagatttgtttctctcacggagcatgacatggcatctggagatggcaatattgtgagagaagaagttgtgaaagagaatgctgccgggtctcccgtaatgaggaaatggttaaatccacgc

SEQ ID NO: 6058 - DNA, 213 bp, Homo Sapiens
gccaagaatttcgaggatgtcagatgtaaatgtatctgccctccctataaagaaaattctgggcatatttataataagaacatatctcagaaagattgtgattgccttcatgttgtggagcccatgcctgtgcgggggcctgatgtagaagcatactgtctacgctgtgaatgcaaatatgaagaaagaagctctgtcacaatcaaggttacc

SEQ ID NO: 6059 - DNA, 3126 bp, Homo Sapiens
aagaatgaagatcaggaaatgtgccatgaatttcaggcatttatgaaaaatggaaaactgttctgtccccaggataagaaattttttcaaagtcttgatggaataatgttcatcaataaatgtgccacgtgcaaaatgatactggaaaaagaagcaaaatcacagaagagggccaggcatttagcaagagctcccaaggctactgccccaacagagctgaattgtgatgattttaaaaaaggagaaagagatggggattttatctgtcctgattattatgaagctgtttgtggcacagatgggaaaacatatgacaacagatgtgcactgtgtgctgagaatgcgaaaaccgggtcccaaattggtgtaaaaagtgaaggggaatgtaagagcagtaatccagagcaggatgtatgcagtgcttttcggccctttgttagagatggaagacttggatgcacaagggaaaatgatcctgttcttggtcctgatgggaagacgcatggcaataagtgtgcaatgtgtgctgagctgtttttaaaagaagctgaaaatgccaagcgagagggtgaaactagaattcgacgaaatgctgaaaaggatttttgcaaggaatatgaaaaacaagtgagaaatggaaggcttttttgtacacgggagagtgatccagtccgtggccctgacggcaggatgcatggcaacaaatgtgccctgtgtgctgaaattttcaagcagcgtttttcagaggaaaacagtaaaacagatcaaaatttgggaaaagctgaagaaaaaactaaagttaaaagagaaattgtgaaactctgcagtcaatatcaaaatcaggcaaagaatggaatacttttctgtaccagagaaaatgaccctattcgtggtccagatgggaaaatgcatggcaacttgtgttccatgtgtcaagcctacttccaagcagaaaatgaagaaaagaaaaaggctgaagcacgagctagaaacaaaagagaatctggaaaagcaacctcatatgcagagctttgcagtgaatatcgaaagcttgtgaggaacggaaaacttgcttgcaccagagagaacgatcctatccagggcccagatgggaaagtgcatggcaacacctgctccatgtgtgaggtcttcttccaagcagaagaagaagaaaagaaaaagaaggaaggtaaatcaagaaacaaaagacaatctaagagtacagcttcctttgaggagttgtgtagtgaataccgcaaatccaggaaaaacggacggcttttttgcaccagagagaatgaccccatccagggcccagatggaaaaatgcatggcaacacctgctccatgtgtgaggccttctttcaacaagaagaaagagcaagagcaaaggctaaaagagaagctgcaaaggaaatctgcagtgaatttcgggaccaagtgaggaatggaacacttatatgcaccagggagcataatcctgtccgtggcccagatggcaaaatgcatggaaacaagtgtgccatgtgtgccagtgtgttcaaacttgaagaagaagagaagaaaaatgataaagaagaaaaagggaaagtcgaggctgaaaaagttaagagagaagcagttcaggagctgtgcagtgaatatcgtcattatgtgaggaatggacgactcccctgtaccagagagaatgatcctattgagggtctagatgggaaaatccacggcaacacctgctccatgtgtgaagccttcttccagcaagaagcaaaagaaaaagaaagagctgaacccagagcaaaagtcaaaagagaagctgaaaaggagacatgcgatgaatttcggagacttttgcaaaatggaaaacttttctgcacaagagaaaatgatcctgtgcgtggcccagatggcaagacccatggcaacaagtgtgccatgtgtaaggcagtcttccagaaagaaaatgaggaaagaaagaggaaagaagaggaagatcagagaaatgctgcaggacatggttccagtggtggtggaggaggaaacactcaggacgaatgtgctgagtatcgggaacaaatgaaaaatggaagactcagctgtactcgggagagtgatcctgtacgtgatgctgatggcaaatcgtacaacaatcagtgtaccatgtgtaaagcaaaattggaaagagaagcagagagaaaaaatgagtattctcgctccagatcaaatgggactggatcagaatcagggaaggatacatgtgatgagtttagaagccaaatgaaaaatggaaaactcatctgcactcgagaaagtgaccctgtccggggtccagatggcaagacacatggcaataagtgtactatgtgtaaggaaaaactggaaagggaagcagctgaaaaaaaaaagaaagaggatgaagacaggagcaatacaggagaaaggagcaatacaggagaaaggagcaatgacaaagaggatctgtgtcgtgaatttcgaagcatgcagagaaatggaaagcttatctgcaccagagaaaataaccctgttcgaggcccatatggcaagatgcacatcaataaatgtgctatgtgtcagagcatctttgatcgagaagctaatgaaagaaaaaagaaagatgaagagaaatcaagtagcaagccctcaaataatgcaaaggatgagtgcagtgaatttcgaaactatataaggaacaatgaactcatctgccctagagagaatgacccagtgcacggtgctgatggaaagttctatacaaacaagtgctacatgtgcagagctgtctttctaacagaagctttggaaagggcaaagcttcaagaaaagccatcccatgttagagcttctcaagaggaagacagcccagactctttcagttctctggattctgagatgtgcaaagactaccgagtattgcccaggataggttatctttgtccaaaggatttaaagcctgtctgtggtgacgatggccaaacctacaacaatccttgcatgctctgtcatgaaaacctgatacgccaaacaaatacacacatccgcagtacagggaagtgtgaggagagcagcaccccaggaaccaccgcagccagcatgcccccgtctgacgaa

SEQ ID NO: 6060 - DNA, 186 bp, Homo Sapiens
cagggctccggtctcactacctgcgtcaatgtcactgagatatcagacagcgtaccaagccctgtacccacgagggagactgacatcgcacagggagttcccagagctttggtgtccgccctccccggaatggaagcacccttgtcccacctggagagccgctaccttcccgcccacttctcaccc

SEQ ID NO: 6061 - DNA, 501 bp, Homo Sapiens
ttaaaaagtagcactttgaagcctactattgaagcattgcctaatgtgctacctttaaatgaagatgttaataagcaggaagaaaagaatgaagatcatactcccaattatgctcctgctaatgagaaaaatggcaattattataaagatataaaacaatatgtgttcacaacacaaaatccaaatggcactgagtctgaaatatctgtgagagccacaactgacctgaattttgctctaaaaaacgataaaactgtcaatgcaactacatatgaaaaatccaccattgaagaagaaacaactactagcgaaccctctcataaaaatattcaaagatcaaccccaaacgtgcctgcattttggacaatgttagctaaagctataaatggaacagcagtggtcatggatgataaagatcaattatttcacccaattccagagtctgatgtgaatgctacacagggagaaaatcagccagatctagaggatctgaagatcaaa

SEQ ID NO: 6062 - DNA, 1524 bp, Homo Sapiens
ccaacatttcaaccacagactgagaaaactaagcaaagctgtgtggaagagcagaggcaggaagaaaaaaacaaagacaatattggttttcaccatttgggcaagagaataaatcaagagctatcatctaaagaaaatattgtccaggaaagaaagaaagatttgtccctttctgaagccagtgagaataagggaagtagtaaatctcaaaattatttcacaaatagacagagactgaataaagaatatagtatcagtaacaaagagaatactcacaatggcctgaggatgtcaatttatcctaagtcaactgggaataaagggtttgaggatggagatgatgctatcagcaaactacatgaccaagaagaatatggcgcagctctcatcagaaataacatgcaacatataatggggccagtgactgcaattaaactcctgggggaagaaaacaaagagaacacacctaggaatgttctaaacataatcccagcaagtatgaattatgctaaagcacactcgaaggataaaaagaagcctcaaagagattcccaagcccagaaaagtccagtaaaaagcaaaagcacccatcgtattcaacacaacattgactacctaaaacatctctcaaaagtcaaaaaaatccccagtgattttgaaggcagcggttatacagatcttcaagagagaggggacaatgatatatctcctttcagtggggacggccaaccttttaaggacattcctggtaaaggagaagctactggtcctgacctagaaggcaaagatattcaaacagggtttgcaggcccaagtgaagctgagagtactcatcttgacacaaaaaagccaggttataatgagatcccagagagagaagaaaatggtggaaataccattggaactagggatgaaactgcgaaagaggcagatgctgttgatgtcagccttgtagagggcagcaacgatatcatgggtagtaccaattttaaggagctccctggaagagaaggaaacagagtggatgctggcagccaaaatgctcaccaagggaaggttgagtttcattaccctcctgcaccctcaaaagagaaaagaaaagaaggcagtagtgatgcagctgaaagtaccaactataatgaaattcctaaaaatggcaaaggcagtaccagaaagggtgtagatcattctaataggaaccaagcaaccttaaatgaaaaacaaaggtttcctagtaagggcaaaagtcagggcctgcccattccttctcgtggtcttgataatgaaatcaaaaacgaaatggattcctttaatggccccagtcatgagaatataataacacatggcagaaaatatcattatgtaccccacagacaaaataattctacacggaataagggtatgccacaagggaaaggctcctggggtagacaaccccattccaacaggaggtttagttcccgtagaagggatgacagtagtgagtcatctgacagtggcagttcaagtgagagcgatggtgac

SEQ ID NO: 6063 - DNA, 312 bp, Homo Sapiens
ttcaaagggaggtttgtgggcaggcctggaagctacgtctatgtattcgatggttaccgcatggaagagtgtgctccagggggctgtctcatggagctctgcattcagctcagcatcatcatgttggggaagcagttgatccagaacaacatctttgagattggagtcccgaagctaaagaaactatttcgaaagctgaaagatgagaccgaagctggagaaactgactctgcccattcgaaacatccagagcagtgggacctagactacagcttggaaccatacacaggactgactccggagtacatggaa

SEQ ID NO: 6064 - DNA, 1470 bp, Homo Sapiens
tcccttcttaggcgcctgggtgagcacattcagcagtttcaggagagctctgcccagggcctgggcctgagcctggggccaggtgctgcagccctcccaaaagtggggtggctggagcaactgctggaccccttcaacgtgtccgacagacgatccttcctacagcgttactgggtgaatgaccaacattgggttggccaggatggacccatattcctgcatctagggggtgagggcagccttgggcctggctcagtgatgagaggccatcccgcagccttggccccagcctggggcgccctggtgataagcctggaacacagattttatggcctgagtatacctgctggaggcctggaaatggcccagctccgcttcttgtccagccgccttgcgctggctgatgtggtctctgcccgcctggcactttcccgcctctttaacatctcctcctccagcccctggatctgcttcggaggctcctatgccggctccttggccgcctgggcccggctgaagttcccccatctcattttcgcgtcggtcgcctcctccgccccggtgcgggccgtgctggatttctccgagtataatgacgtggtatcccgaagcctaatgagcaccgcgatcggcgggtccctggagtgccgggcggcggtgtccgtcgccttcgctgaagtggagcggcggctgcgctcgggtggggcggctcaagcagcattgcggacggagctgagcgcttgcgggcccctgggccgcgctgaaaaccaggcggagctgttgggggcgctgcaggcactggtgggaggtgtagtgcagtatgatgggcagacgggagcgccgctaagcgtgcgacagctctgcggacttctcctcgggggcgggggcaaccgcagccactccacgccctactgcgggcttcgtcgggcggtgcagattgtcttgcacagcctgggccagaagtgtttaagcttttcccgagcagagacagtggcacagctgaggagcacagaacctcaactgtctggtgtgggtgaccggcagtggttgtatcagacatgtaccgagttcggcttctatgtcacctgtgagaatcccagatgtcctttctcccagctcccagcactgccctcccagctagacctatgtgagcaggtgtttgggctctcagccttgtcagtagcccaggctgtggctcagacgaactcctactacggtggccagacccctggggctaacaaagtgctgtttgttaatggggacacagacccctggcatgtgctaagtgtaacacaggctttaggatcctcagaatcaactcttcttatccgcactggctcccactgcttggacatggcacctgagaggccctcagactcccccagcctccgcctagggcgccagaacatcttccagcagctacagacctggctcaagctggcaaaggagagccagattaagggtgaagtc

SEQ ID NO: 6065 - DNA, 441 bp, Homo Sapiens
ggccacccggatgtagccgcctgtcccgggagcctggactgtgccctgaagaggcgggcaaggtgtcctcctggtgcacatgcctgtgggccctgccttcagcccttccaggaggaccagcaagggctctgtgtgcccaggatgcgccggcctccaggcgggggccggccccagcccagactggaagatgagattgacttcctggcccaggagcttgcccggaaggagtctggacactcaactccgcccctacccaaggaccgacagcggctcccggagcctgccaccctgggcttctcggcacgggggcaggggctggagctgggcctcccctccactccaggaacccccacgcccacgccccacacctccctgggctcccctgtgtcatccgacccggtgcacatgtcgcccctggagccccggggagggcaaggcgac

SEQ ID NO: 6066 - DNA, 333 bp, Homo Sapiens
gtgcatggaatatttatggaccgtctagcttccaagaagctctgtgcagatgatgagtgtgtctatactatttctctggctagtgctcaagaagattataatgccccggactgtagattcattaacgttaaaaaagggcagcagatctatgtgtactcaaagctggtaaaagaaaatggagctggagaattttgggctggcagtgtttatggtgatggccaggacgagatgggagtcgtgggttatttccccaggaacttggtcaaggaacagcgtgtgtaccaggaagctaccaaggaagttcccaccacggatattgacttcttctgcgag

SEQ ID NO: 6067 - DNA, 516 bp, Homo Sapiens
acctccatctcgccaggaagatgcaagtggaataagcacactctaacttacaggattatcaattacccacatgatatgaagccatccgcagtgaaagacagtatatataatgcagtttccatctggagcaatgtgacccctttgatattccagcaagtgcagaatggagatgcagacatcaaggtttctttctggcagtgggcccatgaagatggttggccctttgatgggccaggtggtatcttaggccatgcctttttaccaaattctggaaatcctggagttgtccattttgacaagaatgaacactggtcagcttcagacactggatataatctgttcctggttgcaactcatgagattgggcattctttgggcctgcagcactctgggaatcagagctccataatgtaccccacttactggtatcacgaccctagaaccttccagctcagtgccgatgatatccaaaggatccagcatttgtatggagaaaaatgttcatctgacatacct

SEQ ID NO: 6068 - DNA, 3309 bp, Homo Sapiens
atgccaatgcacatgccccgaatgcctggatttagcagtaaaagtgaggagatgatgcggtataatcaattcaactttatgaacggcccacatatggcacacctggggcccttctttggaaacggtctccctcagcaatttccacagtaccagatgcccatgtggcctcagccaccacccaacacatggcatccacggaaatcctcagcacccaaacgtcataacaagactgatcagacccaagaaacccagaaacccaaccagactcagtcaaaaaagccaccacaaaagcggcctttgaagcagccatcacataatcaacctcagcccgaagaggaagctcaaccccctcaggcattcccaccatttggaaatgggctattcccctatcaacaaccaccatggcaaattccacagaggttaccaccaccaggttatggacgcccaccaatcagcaatgaagaaggggggaatccttactttggatattttggatatcatggctttgggggtcgccctccttattattcagaagaaatgtttgaacaagattttgaaaaacccaaagaagaagatcctcctaaagcagaaagtccaggcacagaacccacagctaattcaacagtcactgagacgaattctacccaaccaaatcctaaagggagtcagggaggaaatgacaccagccccacaggaaacagtaccccaggactaaacactgggaacaaccctccagctcaaaatgggattggcccactccctgcagtcaacgcttcaggccagggagggccaggaagtcaaatcccatggagaccaagtcagccaaatattcgtgaaaatcatccatatcctaatataagaaattttccttcaggaagacagtggtatttcactggtactgtcatggggcacagacagaataggcctttttacagaaatcaacaagttcaaaggggtcctcggtggaacttctttgcttgggaacgtaaacaagtagctcgtccaggaaatccagtttatcacaaagcttaccctcctacttcaagaggcaattatcccaattatgcaggaaatccagcaaatctcagaagaaagcctcaggggccaaataaacaccctgtaggaactactgttgccccactgggtcccaaacctggccctgttgttcgcaatgaaaaaatccaaaatccaaaggagaagcccctgggtccaaaagaacaaataatagttcctacaaagaatccaaccagcccctggagaaactctcaacagtatgaagttaataaatcaaattataaactgcctcactctgagggttatatgccagtcccaaattttaattctgttgatcaacatgaaaactcctattacccaagaggagattccagaaaagtcccaaattctgatggacaaacccaaagccagaatttgcccaaagggattgttttagggtcaagaaggatgccatatgaatcagaaactaatcagtcagaattaaagcacagctcatatcagcctgctgtataccctgaggaaatcccttctcctgcaaaagaacattttcctgctggaagaaatacttgggaccaccaagaaatctctccaccttttaaggaagatccagggaggcaagaagaacatttaccccatccttcccatggttctagaggaagtgttttctaccctgaatataacccatatgatcccagggaaaactcaccataccttagaggcaatacatgggatgagagagatgattctcccaatactatggggcaaaaagaaagtccactctaccccataaataccccagaccagaaggagatagtcccttataatgaagaggacccagttgatccaactggagatgaagtctttcctggacaaaatagatggggtgaagagttgagcttcaaaggaggcccaacagttaggcactatgaaggtgaacaatatacctcaaatcagccaaaggaatatcttccctattctttagataatccatcaaaaccaagggaggatttttattacagtgaattttacccatggagcccggatgagaattttccatcatataatacagcttctactatgccaccacctatagagagcaggggctactacgttaataatgccgctggaccagaagaaagcactctatttccttcacggaattcctgggaccacaggatacaagcccaagggcagagagaaagaaggccgtattttaacagaaatatctgggatcaggcaacacatttacaaaaagccccagctaggccaccagaccagaaaggtaaccagccctattacagtaacaccccagctgggcttcagaaaaatccaatatggcatgaaggtgagaatttgaactatggcatgcaaataactaggatgaattctccagagagagaacattcatctttccctaacttcatcccaccaagttacccatcaggtcaaaaagaagcacatttatttcacctaagccagagaggctcttgctgtgctggtagctccacagggcccaaggacaatccactagctctacaagactacactccatcctatggtcttgcacctggggagaaccaagacaccagtcctctgtatacagacggtagtcataccaagcagacaagagatatcatctccccaacaagcatcctaccaggccaaagaaacagctcagagaagagggaaagccaaaacccttttagagatgatgtgtccacgctgaggaggaacacaccatgttctataaagaatcaactgggccaaaaggaaattatgccctttcctgaagccagttcccttcaatcaaagaatacaccttgtctcaaaaatgatcttggaggagatgggaacaacattctggaacaagtttttgaagacaaccagctcaatgaaagaactgttgaccttactcctgagcagcttgttattggtacacctgatgaaggctccaatccagaaggcatccaaagtcaagtccaagaaaatgagagtgagaggcaacagcaaagaccatctaacattctgcatttgccatgctttggctccaaattagcaaagcatcactcttccaccaccggaactccatctagcgatggaaggcaaagcccatttgatggggattcaattacgcctactgaaaatcctaacacattggttgagttagctactgaggaacaatttaagagtataaatgtagacccacttgatgcagatgaacacagtccatttgaattccttcaaagagggaccaatgtacaggaccaggtacaagactgcttactacttcaggcc

SEQ ID NO: 6069 - DNA, 1155 bp, Homo Sapiens
cagcagcaccaccttgtggagtacatggaacgccgactagctgctttagaggaacggctggcccagtgccaggaccagagtagtcggcatgctgctgagctgcgggacttcaagaacaagatgctgccactgctggaggtggcagagaaggagcgggaggcactcagaactgaggccgacaccatctccgggagagtggatcgtctggagcgggaggtagactatctggagacccagaacccagctctgccctgtgtagagtttgatgagaaggtgactggaggccctgggaccaaaggcaagggaagaaggaatgagaagtacgatatggtgacagactgtggctacacaatctctcaagtgagatcaatgaagattctgaagcgatttggtggcccagctggtctatggaccaaggatccactggggcaaacagagaagatctacgtgttagatgggacacagaatgacacagcctttgtcttcccaaggctgcgtgacttcacccttgccatggctgcccggaaagcttcccgagtccgggtgcccttcccctgggtaggcacagggcagctggtatatggtggctttctttattttgctcggaggcctcctggaagacctggtggaggtggtgagatggagaacactttgcagctaatcaaattccacctggcaaaccgaacagtggtggacagctcagtattcccagcagaggggctgatccccccctacggcttgacagcagacacctacatcgacctggcagctgatgaggaaggtctttgggctgtctatgccacccgggaggatgacaggcacttgtgtctggccaagttagatccacagacactggacacagagcagcagtgggacacaccatgtcccagagagaatgctgaggctgcctttgtcatctgtgggaccctctatgtcgtctataacacccgtcctgccagtcgggcccgcatccagtgctcctttgatgccagcggcaccctgacccctgaacgggcagcactcccttattttccccgcagatatggtgcccatgccagcctccgctataacccccgagaacgccagctctatgcctgggatgatggctaccagattgtctataagctggagatgaggaagaaagaggaggaggtt

SEQ ID NO: 6070 - DNA, 342 bp, Homo Sapiens
actcccccgacctgctactcccgcatgcgggccctgagccaggagatcacccgcgacttcaacctcctgcaggtctcggagccctcggagccatgtgtgagatacctgcccaggctgtacctggacatacacaattactgtgtgctggacaagctgcgggactttgtggcctcgcccccgtgttggaaagtggcccaggtagattccttgaaggacaaagcacggaagctgtacaccatcatgaactcgttctgcaggagagatttggtattcctgttggatgactgcaatgccttggaatacccaatcccagtgactacggtcctgccagatcgtcagcgc

SEQ ID NO: 6071 - DNA, 1152 bp, Homo Sapiens
aaggtgattctggataaatactacttcctctgcgggcagcctctccacttcatcccgaggaagcagctgtgtgacggagagctggactgtcccttgggggaggacgaggagcactgtgtcaagagcttccccgaagggcctgcagtggcagtccgcctctccaaggaccgatccacactgcaggtgctggactcggccacagggaactggttctctgcctgtttcgacaacttcacagaagctctcgctgagacagcctgtaggcagatgggctacagcagcaaacccactttcagagctgtggagattggcccagaccaggatctggatgttgttgaaatcacagaaaacagccaggagcttcgcatgcggaactcaagtgggccctgtctctcaggctccctggtctccctgcactgtcttgcctgtgggaagagcctgaagaccccccgtgtggtgggtggggaggaggcctctgtggattcttggccttggcaggtcagcatccagtacgacaaacagcacgtctgtggagggagcatcctggacccccactgggtcctcacggcagcccactgcttcaggaaacataccgatgtgttcaactggaaggtgcgggcaggctcagacaaactgggcagcttcccatccctggctgtggccaagatcatcatcattgaattcaaccccatgtaccccaaagacaatgacatcgccctcatgaagctgcagttcccactcactttctcaggcacagtcaggcccatctgtctgcccttctttgatgaggagctcactccagccaccccactctggatcattggatggggctttacgaagcagaatggagggaagatgtctgacatactgctgcaggcgtcagtccaggtcattgacagcacacggtgcaatgcagacgatgcgtaccagggggaagtcaccgagaagatgatgtgtgcaggcatcccggaagggggtgtggacacctgccagggtgacagtggtgggcccctgatgtaccaatctgaccagtggcatgtggtgggcatcgttagctggggctatggctgcgggggcccgagcaccccaggagtatacaccaaggtctcagcctatctcaactggatctacaatgtctggaaggctgagctg

SEQ ID NO: 6072 - DNA, 495 bp, Homo Sapiens
aactataatatcaacgtcaatgatgacaacaacaatgctggaagtgggcagcagtcagtgagtgtcaacaatgaacacaatgtggccaatgttgacaataacaacggatgggactcctggaattccatctgggattatggaaatggctttgctgcaaccagactctttcaaaagaagacatgcattgtgcacaaaatgaacaaggaagtcatgccctccattcaatcccttgatgcactggtcaaggaaaagaagcttcagggtaagggaccaggaggaccacctcccaagggcctgatgtactcagtcaacccaaacaaagtcgatgacctgagcaagttcggaaaaaacattgcaaacatgtgtcgtgggattccaacatacatggctgaggagatgcaagaggcaagcctgtttttttactcaggaacgtgctacacgaccagtgtactatggattgtggacatttccttctgtggagacacggtggagaac

SEQ ID NO: 6073 - DNA, 333 bp, Homo Sapiens
ccttcccagatgctcctggagaacttctcagccgccatcccaggccaccgatgctggacacacatgctggacaatggctctgcggtttccacaaacatgacccccaaggcccttctgaccatctccatcccgccaggccccaaccaggggccccaccagtgccgccgcttccgccagccacagtggcagctcttggaccccaatgccacggccaccagctggagcgaagctgacacggagccgtgtgtggacggctgggtctatgaccgcagcgtcttcacctccaccatcgtggccaagtgggacctggtgtgcagctcccagggcttgaag

SEQ ID NO: 6074 - DNA, 195 bp, Homo Sapiens
agcagcttcaccatcgacctgccctggggcggctgctaccatgagtggaacacagaacactgtatggagttccagaagaccaacggctccctgaatggtacctctgagaatgccacctctcctgtcatcgagttctgggagcggcgggtcttgaagatctctgatgggatccagcacctgggggccctgcgctgg

SEQ ID NO: 6075 - DNA, 2232 bp, Homo Sapiens
aggggcaccccgctcctggcgcggcctgcgccgcccggtgcctcccgctacagtctctacacgacgggatggcgcccgcggctgcgcccggggccgcacaaggccctctgtgcctatgtggtgcacaggaatgtgacctgcatcctacaggagggagcggagagctacgtaaaggctgaataccggcagtgtagatgggggcccaagtgccccgggacagtcacgtaccgcacagtactcagacccaaatacaaggttggctacaagacagtgacagacctcgcctggcgttgctgtcccggcttcactgggaaacgctgccctgagcacctcacggaccatggggctgcctcaccccagctggagcctgagcctcagattccttcagggcagctggacccaggccccaggcccccttcctacagcagagcagcccccagccctcatggaaggaaaggcccagggctgtttggtgagcggctggaacgcctggagggtgatgtccagcgcctggctcaaacatatggtaccctcagtggcctggtggctagccacgaggatcccaacaggatgactggtggccccagggctcctgctgtccctgtgggctttggggtcatccctgaggggcttgtgggcccaggagacagagccagagggccactaacacctcccttagacgagatcctaagcaaggtgacagaggtgagcaacactcttcagaccaaggtgcagcttctagacaaggtgcatgggctggcacttggccatgaggcccacctgcagcggctgcgggaagccccaccatccccgctcacctccctggccctgctggaggagtacgtggaccgacggctgcaccgactctgggggagcctgctggatggctttgagcagaagctgcaaggcgtccagagtgagtgtgacctgcgggtgcaggaggtacggcggcaatgtgaggagggtcaggctgccagccggaggctgcaccagagcctcgatggccgggagctggccctgcgccaggagctgtcacagctgggcagccagctgcagggcctgagcgtgtctggcaggggcagctgctgtgggcaactagccttgatcaatgcccgtatggatggccttgagagggccctgcaggcagtcaccgagacccaaaggggccccggtgccccggccggggatgagcttacgaggctctctgctgccatgctcgagggaggtgtggacgggctgcttgagggtctggagacgctcaatgggacagagggtggagcaaggggatgctgtctgaggttggacatgggggggtggggagtgggcggctttgggaccatgctggaagagcgcgtgcagagcctcgaggagcgcctagcaacattggctggggagctaagccatgacagcgcctctccgggcaggtcagctcggccccttgtgcagacagagctggctgtgctagagcaacggttggtctcactggagacttcgtgcaccccgagcaccacctcagccatcctggacaacctcgtggcagaggtgaaggcctggcagagccggagcgaggccctcctacgccaggtggccagccacgcagcactgctccagcagctcaatggcactgtggccgaggtccagggacagctggcagaagggacgggcagctcacttcaaggcgagatcactctgctcaaggtcaatctgaactcagtgagcaagtcgctcacaggcctcagtgactctgtcagccagtactctgatgccttcttggctgccaacacgtccctggatgagcgggaacgcaaggtggaagccgaagtccaggccatccaggagcaggtcagcagccaaggctccaggcttcaggctggccacaggcaggtcctgaacctgcgtggggagctggagcaactcaaggctggtgtggccaaggtggccagtgggctgagccgctgccaggacacagcccagaaacttcagcacacagtgggacactttgaccagcgggtggcacaagtggagggtgcgtgcaggaggctgggcctgctggccgcgggcctggacagcttgcccactgagccactgaggcccagagagggcctgtggagccatgtggaccagctgaatcgtacgctggcccagcacacgcaggacattgcccgcctccgggatgacctactggactgccaggcccagctggctgagcaggtgcggccagggcaagccaac

SEQ ID NO: 6076 - DNA, 522 bp, Homo Sapiens
cagaacgacacggagcccatcgtgctggagggcaagtgtctggtggtgtgcgactcgaacccggccacggactccaagggctcctcttcctccccgctggggatatcggtccgggcggccaactccaaggtcgccttctcggcggtgcggagcaccaaccacgagccatccgagatgagcaacaagacgcgcatcatttacttcgatcagatcctggtgaatgtgggtaattttttcacattggagtctgtctttgtagcaccaagaaaaggaatttacagtttcagttttcacgtgattaaagtctaccagagccaaactatccaggttaacttgatgttaaatggaaaaccagtaatatctgcctttgcgggggacaaagatgttactcgtgaagctgccacgaatggtgtcctgctctacctagataaagaggataaggtttacctaaaactggagaaaggtaatttggttggaggctggcagtattccacgttttctggctttctggtgttcccccta

SEQ ID NO: 6077 - DNA, 735 bp, Homo Sapiens
tggctgacgacgggcgcccccgagccgccgccgctgtccggagccccacaggacggcatcagaattaatgtaactacactgaaagatgatggggacatatctaaacagcaggttgttcttaacataacctatgagagtggacaggtgtatgtaaatgacttacctgtaaatagtggtgtaacccgaataagctgtcagactttgatagtgaagaatgaaaatcttgaaaatttggaggaaaaagaatattttggaattgtcagtgtaaggattttagttcatgagtggcctatgacatctggttccagtttgcaactaattgtcattcaagaagaggtagtagagattgatggaaaacaagttcagcaaaaggatgtcactgaaattgatattttagttaagaaccggggagtactcagacattcaaactataccctccctttggaagaaagcatgctctactctatttctcgagacagtgacattttatttacccttcctaacctctccaaaaaagaaagtgttagttcactgcaaaccactagccagtatcttatcaggaatgtggaaaccactgtagatgaagatgttttacctggcaagttacctgaaactcctctcagagcagagccgccatcttcatataaggtaatgtgtcagtggatggaaaagtttagaaaagatctgtgtaggttctggagcaacgttttcccagtattctttcagtttttgaac

SEQ ID NO: 6078 - DNA, 171 bp, Homo Sapiens
agtcttgctccccaatatgttatgtatggaagccaaaattacttaatagagactaatataacttctgataatcataaaggcaattcaaccctttctgtgccaaagagatgtgatgcagatgctcctgaagatcagtgtactgttacccggacatacctattccttcacaag

SEQ ID NO: 6079 - DNA, 237 bp, Homo Sapiens
gtcttgaaagatatgaagcttttgcgccagagcttggccactctcctaattacctcccagatcctcaaccaaattatggaatcttttcttccttattggctccaaaggaagcatggtgtgcgggtgaagaggaaggtgcaggctttaaaggcagacattgatgctacattatatgaacaagtcatcctggaaaaagaaatgggaacttatttgggcacctttgatgattacttggag

SEQ ID NO: 6080 - DNA, 1356 bp, Homo Sapiens
ccaggagtcgtgcctaaagacatagaggacatctatcttagcatctgtgtgtttggccaatacaaaaagacacaatgtgtcccagccacttttcccctggtcttcaatgccagaatggtgtttgaaaaggtgttcccggacgcagtagatcctggagatgtggttacacagcttgaatatgatacagcagtgttcgagttgatacagctagttccaccagtgggtgaaacactgtctacgtatgacgaaaatacacgagatttcatgtttccgggtccaaaccaaatgtctggacaccatgattcaaaccgccaggttaccatgaggaggatttctggccttcgaggaaatgctccaaggctggaattttctacgacttcagtgattactgaatgtctgataagttcaaggaaatgccacactcaggataaatttatttaccatttggctccagttgaaaaatcacatggcagactgcaaaacagaacatcaagatcacaaaagaaaaaatccaagtcacctgagagaagtaaatactgtataaatgcaaaaaactacgaacagcctacaatttcttcaaaatcacactctccatctccctacacaaaaagacgcatgtgtgagctatctgaagacaccaggcggcggctggcccatttaaatctgggaccctatgagttcaaaaaagaaacagataaacctccatttgtgattagacatgttgatcccccaagtcccagggctgatactttattgggatcttctggaagagactgtgaaagagatggatggtcaagggtgcacaatgatcattctcatcttggctgctgccgacccaaggattataaggttatcaggacaccccatgggagagacttcgatgactctttagaaaaatgtgaagagtatttgagcccaaggtcgtgtagtaagccccggcattcagcgaggaccttgctagtccattcagcaccctcaacaatgccaaagcattctccaagccctgtgttaaatagagcttctctcagggaaagatttcattctgattggtgttcaccttcaaactgcgatgagatccatgaccgggatgagagagacctagagaaagatgatgaactggaactgaaaagaagtcttttatgtagagactctgcctatgacagtgaccccgagtatagctcatgtcagcagccacgtggcactttccatttggatgacggtgaatactggtccaacagggcagcctcttataagggaaaatcccaccgacccatctttgagaacagcatggacaagatgtacaggaacttatacaaaaaggcctgtagttctgcttcacatacacaggaaagcttc

SEQ ID NO: 6081 - DNA, 576 bp, Homo Sapiens
gctttgatccctgaaccagaagtgaaaattgaagttctccagaagccattcatctgccatcgcaagaccaaaggaggggatttgatgttggtccactatgaaggctacttagaaaaggacggctccttatttcactccactcacaaacataacaatggtcagcccatttggtttaccctgggcatcctggaggctctcaaaggttgggaccagggcttgaaaggaatgtgtgtaggagagaagagaaagctcatcattcctcctgctctgggctatggaaaagaaggaaaaggtaaaattcccccagaaagtacactgatatttaatattgatctcctggagattcgaaatggaccaagatcccatgaatcattccaagaaatggatcttaatgatgactggaaactctctaaagatgaggttaaagcatatttaaagaaggagtttgaaaaacatggtgcggtggtgaatgaaagtcatcatgatgctttggtggaggatatttttgataaagaagatgaagacaaagatgggtttatatctgccagagaatttacatataaacacgatgagtta

SEQ ID NO: 6082 - DNA, 210 bp, Homo Sapiens
cgctggctgctctgtaacggcagtttgttccgatacaagcacccgtctgaggaggagcttcgggccctggcggggaagccgaggcccagaggcaggaaagagcggtgggccaatggccttagtgaggagaagccactgtctgtgccccgagatgccccgttccagctggagacctgccccctcacgaccgtggatgccctggtcctgcgc

SEQ ID NO: 6083 - DNA, 1107 bp, Homo Sapiens
aaagacgagggcttcgcggtgaaggcgctgtggggccgcacgcaggaagaagcggaggagctggccaaggagatgagtgtccccttctacactagccgcattgatgaggtgctgctgcatcaggacgtggacttggtgtgcattaacctgccgccgcccctcaccagacagatcgctgtcaaaaccctaggcatcggcaagaacgtcatctgcgaccgcacggccacgccgctggacgctttccgcatgacctcggccgcccactactaccccaagctcatgagcatcatgggcaacgtgctgcgcttcctgccggctttcgtgcgcatgaagcagctgatcgaggagggctacgtgggcgagccgctggtgtgtgaggtgcaggtgcacggcggcagcctgctgggcaagaagtacaactggagctgcgacgacttgatgggcggcggcggcctgcactccgtgggcacctacatcatcgacctgctcaccttcctcaccggccaaaaggccgtcaaggtccacgggctgctcaagaccttcgtgaagcagactgaccacatcaagggcatccgacagatcaccagcgatgacttctgcaccttccagatggtgctggagggcggggtgtgctgcaccgtcaccctcaacttcaacgtgcccggcgagttcaagcaggatgtcactgtggtgggctcagccgggcgcctgctggccgtgggcaccgacctgtacgggcagcgcaacagcgccccggagcaggagctgctggtgcaggacgccacgccggtgagcaactccctgcttccggagaaggccttcagcgacatcccctcgccctacctgcgcggcaccatcaagatgatgcaggcggtgcgccaggccttccaggaccaggacgaccggcgcacgtgggatgggcggcccctcaccatggccgccaccttcgacgactgcctgtatgccttgtgcgtggtggacaccatcaagaggtccagccagacgggcgagtggcagaacattgccatcatgaccgaggagccggagctgagccccgcctacctgatcagcgaggccatgcgccgcagcaggatgtccctctactgt

SEQ ID NO: 6084 - DNA, 1131 bp, Homo Sapiens
cgcttgctcaactacttcacatggccaaccacaacgtccattgaggttcaatatgtggaaaagatggagttcccagctgtgacattttgtaatttgaacaggttccaaacagatgctgtagccaaatttggtgttatttttttcttatggcacattgtatccaaagtcctccatcttcaagaaattactgccaattccactggctctagagaggctactgattttgctgcaagtcaccaaaacttcagcattgtggaatttatcaggaacaaaggtttttatctcaacaatagcactttgttggactgtgagttttttggaaagccatgtagcccaaaggattttgcacatgtcttcactgaatatggaaattgttttacttttaatcatggtgaaactctccaagcaaagagaaaagtgagtgtctctggaagaggtttgagcttactcttcaatgtgaatcaggaggcattcactgataacccagcccttggtttcgttgatgctgggatcatctttgttatccattcaccaaagaaggtgccacagtttgatgggttaggcttgttgtcacctgtgggaatgcacgcaagggtaaccatccgccaagtgaagacagttcatcaagaatacccttggggagaatgcaatcctaacatcaagctgcagaattttagcagctacagcacttctggttgcttgaaggaatgcaaagcccagcacataaaaaagcaatgtggatgtgtgccttttcttcttcctggatatgggatagaatgtgacctacaaaagtacttcagctgtgtttctcctgtacttgaccacattgaatttaaggatttatgtacagtaggaacacataactctagctgccccgtttcttgtgaagaaatagaatacccggccactatttcttattcctcttttccaagtcaaaaagctttgaaatatctttccaagaagttgaatcaaagccggaaatacatcagggagaatcttgtaaaaattgaaattaactatagtgacctaaactataagataacccagcagcaaaaggcggtgagtgtgtctgagttacttgcagatcttggtggtcagctgggtctattttgtggggccagtctgatcacg

SEQ ID NO: 6085 - DNA, 267 bp, Homo Sapiens
agccgcatcctgtacacagatatggtagcatgtgtggtaccttctgaatgcgtgaaacactgtggcgttgatgttggctgcaccaactacgcataccccacgatggtgctggaactgatgccccaaggactgcgaggcctgatgctttcggtcatgctggcctctctcatgagctccctgacctccatcttcaacagcgccagcaccctcttcaccattgacctctacaccaagatgcggaagcaagcgtcggagaaagagctcctg

SEQ ID NO: 6086 - DNA, 384 bp, Homo Sapiens
gggctcgaaaccgaaagtcccgtccggaccctccaagtggagaccctggtggagcccccagaaccatgtgccgagcccgctgcttttggagacacgcttcacatacactacacgggaagcttggtagatggacgtattattgacacctccctgaccagagaccctctggttatagaacttggccaaaagcaggtgattccaggtctggagcagagtcttctcgacatgtgtgtgggagagaagcgaagggcaatcattccttctcacttggcctatggaaaacggggatttccaccatctgtcccagcggatgcagtggtgcagtatgacgtggagctgattgcactaatccgagccaactactggctaaagctggtgaagggc

SEQ ID NO: 6087 - DNA, 1470 bp, Homo Sapiens
ggctcccctgccctccgctggtacaggacctcctgccacttgaccaaggccgtccctggcaacccactggggtacctgagcttcctggccaaggatgctcagggactggccctgatccatgcccgctgggatgcgcataggaggctgcaggcatgtagctgggaggatgagccggagctcaccgcagcctacggtgctctctgtgctcatgagactgcctggggctccttcatccacacccccggacccgagctgcagagagcactggccactcttcagagtcagtgggaggcatgccgagcgcttgaggagagtccagcaggggccaggaagaagcgagcagcagggcagagtggagtccctggtggagggcaccagcgagagaagagaggatggaccatgcctggcacactgtggtgtggagttggagattctgctgggaactcctcggagctgggggtcttccagggacctgatctctgttgccgggaacatgaccgctgcccacagaacatctcacccttgcagtacaactatggcatccgaaactaccgattccacaccatctcccactgtgactgtgacaccaggtttcagcaatgcctacagaatcagcacgactccatctcggacatcgtgggcgtggccttcttcaacgtgctggagatcccctgctttgtgctggaggagcaggaggcgtgtgtggcgtggtactggtggggcgggtgtaggatgtatggcacagtgcccctcgctcgcctgcagcccaggaccttctacaatgcctcctggagctcccgggccacctccccaactcccagctcccggagcccagcccctcccaagcctcgacagaagcagcaccttcggaaggggccaccacatcagaaagggtccaagcgccccagcaaagccaacaccacagccctccaggaccctatggtctctcccaggcttgatgtggcccccacaggcctccagggcccacagggtggcctaaaacctcagggtgcccgctgggtctgccgcagcttccgccgccacctggaccagtgtgagcaccagattgggccccgggaaatcgagttccagctgctcaacagcgcccaagagcccctcttccactgcaactgcacgcgccgtctggcacgcttcctgaggctccacagcccacccgaggttaccaacatgctttgggagctgctgggcacaacctgcttcaagctggcccctccactggactgtgtggaaggcaaaaactgttccagagaccctagggccatcagggtgtcagcccggcacttgcggaggcttcagcagaggcgacaccagctccaggataaaggcacagatgagaggcagccatggccttcagagcccctgagaggccccatgtcattctacaaccagtgcctgcagctaacccaggcagccaggagacccgacaggcagcagaagtcctggagccag

SEQ ID NO: 6088 - DNA, 1404 bp, Homo Sapiens
gggtctgatgagcctggcccagagggcctcacctccacctccctgctagacctcctgctgcccactggcttggagccactggactcagaggagcctagtgagaccatgggcctgggagctgggctgggagcccctggctcaggcttccccagcgaagagaatgaagagtctcggattctgcagccaccacagtacttctgggaagaggaggaagagctgaatgactcaagtctggacctgggacccactgcagattatgtttttcctgacttaactgagaaggcaggttccattgaagacactagccaggctcaagagctgccaaacctcccctctcccttgcccaagatgaatctggttgagcctccctggcatatgcctcccagagaggaggaagaagaggaagaggaagaggaggagagggagaaggaagaggtagagaaacaagaggaggaggaagaggaggagctgctccctgtgaatggatcccaagaagaagccaagcctcaggtccgtgacttttctctcaccagcagcagccagaccccaggggccaccaaaagcaggcatgaagactccggggaccaggcctcatcaggtgtggaggtggagagcagcatggggcccagcttgctgctgccttcagtcaccccaactacagtgactccgggggaccaggactccaccagccaagaggcagaggccacagtgctgccagctgcagggcttggggtagagttcgaggctcctcaggaagcaagcgaggaagccactgcaggagcagctggtttgtctggccagcacgaggaggtgccggccttgccttcattccctcaaaccacagctcccagtggggccgagcacccagatgaagatccccttggctctagaacctcagcctcttccccactggcccctggagacatggaactgacaccttcctctgctaccttgggacaagaagatctcaaccagcagctcctagaagggcaggcagctgaagctcaatccaggataccctgggattctacgcaggtgatctgcaaggactggagcaatctggctgggaaaaactacatcattctgaacatgacagagaacatagactgtgaggtgttccggcagcaccgggggccacagctcctggccctggtggaagaggtgctgccccgccatggcagtggccaccatggggcctggcacatctctctgagcaagcccagcgagaaggagcagcaccttctcatgacactggtgggcgagcagggggtggtgcccactcaagatgtcctttccatgctgggtgacatccgcaggagcctggaggagattggcatccagaactattccacaaccagcagctgccaggcgcgggccagccaggtgcgcagcgactacggcacg

SEQ ID NO: 6089 - DNA, 1956 bp, Homo Sapiens
caggccccagcacccacagtcaacactcactttgggaagctaaggggtgcccgagtaccactgcccagtgagatcctggggcctgtggaccaatacctgggggtgccctacgcagctcccccgatcggcgagaaacgtttcctgccccctgaaccacccccatactggtcgggcatccggaacgccacacactttccaccagtgtgcccccagaacatccacacagctgtgcccgaagtcatgctgccggtctggttcactgccaacttggatatcgtcgctacttacatccaggagcccaacgaagactgtctctacctgaacgtctatgtgccgacggaggatggatccggcgctaagaaacagggcgaggacttagcggataatgacggggatgaagatgaagacatccgggacagtggtgctaaacccgtcatggtctacatccacggaggctcttacatggaagggacaggcaacatgattgatggcagcatcctcgccagttatggcaatgtcatcgtcatcaccctcaactatcgggttggagtgctaggtttcctgagtactggagatcaggctgccaagggcaactatgggctccttgaccagatccaggccctccgctgggtgagcgagaatattgccttcttcgggggagacccccgccggatcactgtctttggctcgggcattggtgcatcctgcgtcagcctcctaacgttgtcacatcactcagagggacttttccagagagccatcatccaaagtggctctgctctgtccagctgggctgtgaactaccaaccagtgaagtacaccagcctgctggcagacaaagtgggctgtaatgtgctggacaccgtggatatggtggactgtcttcggcaaaagagtgccaaggagctggtagagcaggacatccagccagcccgctaccacgtggcctttggccctgtgattgatggtgatgtcattcctgatgaccctgagatcctcatggagcagggcgagttcctcaactatgacatcatgctaggtgtcaaccagggcgagggtctcaagtttgtggaaggggtggtggaccctgaggatggtgtctctggcactgactttgactattccgtctccaattttgtggacaatctgtatggctatcctgagggtaaggacaccctgcgagagaccatcaagttcatgtatacagactgggcagaccgtgacaaccctgagacccgccgtaaaacactggtggcactcttcactgaccaccagtgggtggagccctcagtggtgacagccgatctgcatgcccgctacggctcgcctacctacttctacgccttctatcatcactgccagagcctcatgaagcctgcttggtcagatgcagctcatggggatgaagtaccctatgtttttggggttcctatggtaggccccactgaccttttcccctgcaacttctccaagaatgatgttatgctcagtgctgtcgtcatgacctattggaccaactttgccaagactggggatcccaacaagccggtcccccaggacaccaagttcattcacaccaaggccaaccgctttgaggaagtggcctggtccaaatacaatccccgagaccagctctaccttcacatcgggctgaaaccaagggtccgagatcattaccgggccactaaggtggccttttggaaacatctggtgccgcacctatacaacctgcatgacatgttccactatacgtccaccaccaccaaagtgccgcctccggataccacccacagctcccacatcacccgcaggcccaatggcaagacctggagcaccaagcggccagccatctcacctgcctacagcaacgagaatgcccaggggtcctggaacggggaccaggatgcagggccactcctggtggagaaccctcgtgactactccactgaattaagt

SEQ ID NO: 6090 - DNA, 195 bp, Homo Sapiens
atggaatcagcaagagaaaacatcgaccttcaacctggaagctccgaccccaggagccagcccatcaacctgaaccattacgccaccaagaagagcgtggcggagagcatgctggacgtggccctgttcatgtccaacgccatgcggctgaaggcggtgctggagcagggaccatcctctcactactacaccacc

SEQ ID NO: 6091 - DNA, 1446 bp, Homo Sapiens
atagatgaaacacgggcgcatctgttgttgaaagaaaagatgatgcggctgggggggcggctggtgctgaacaccaaggaggagctggccaatgagaggctcatgacgctcaaaatcgctgagatgaaggaggccatgaggaccctgatattcccacccagcatgcactttttccaggccaagcatctcattgagagaagtcaagtgtttaatattctaaggatgatgccaaaaggggctgccttgcacctccatgacattggcatcgtgactatggactggctggtgaggaatgtcacctacaggcctcactgccacatctgtttcaccccaagggggatcatgcagttcagatttgctcacccaactccccgtccatcagaaaaatgttccaagtggattctgctggaggattatcggaagcgggtgcagaacgtcactgagtttgatgacagcttgctgaggaatttcactctggtgacccagcacccggaggtgatttacacaaaccaaaatgttgtctggtcgaaatttgaaaccatcttcttcaccatctctggtctcatccattacgcaccagtgttcagagactatgtcttccggagcatgcaggagttctacgaggacaacgtgctctacatggagatcagagccaggctgctgccggtgtatgagctcagtggagagcaccatgacgaagagtggtcagtgaagacttaccaggaagtagctcagaagtttgtggaaactcaccctgagtttattggaatcaaaatcatttattcggatcacagatccaaagatgtggctgtcatcgcagaatccatccgaatggccatggggctccgaatcaagttccccacggtggtggcagggtttgacctggtggggcatgaggacactggccactccttgcatgactacaaggaagctctgatgatccccgccaaggatggcgttaagctgccttacttcttccacgccggagaaacagactggcagggtacttccatagacaggaacattctggatgctctgatgctgaacactaccagaatcggccatggatttgctttgagcaaacaccccgcagtcaggacttactcctggaaaaaggacatccccatagaagtctgtcccatctctaaccaggtgctgaaactggtgtctgacttgaggaaccaccctgtagccactctgatggccactgggcaccccatggtgatcagctctgatgacccagctatgtttggtgccaaaggcttgtcctatgatttctatgaggtcttcatgggcattggggggatgaaggctgacctgaggaccctcaaacagctggccatgaactctatcaagtacagtaccctgttggagagtgagaaaaatactttcatggaaatctggaagaagagatgggataagttcatagcagatgtggctacaaag

SEQ ID NO: 6092 - DNA, 369 bp, Homo Sapiens
aacctggttcagtttggggtgatgatcgagaagatgacaggcaagtccgccctgcagtacaacgactatggctgttactgcggcatcggtggctcccactggccggtggaccagactgactggtgctgccacgcccacgactgctgctacgggcgtctggagaagctgggctgtgagcccaaactggaaaagtatcttttctctgtcagcgaacgtggcattttctgcgccggcaggaccacctgccagcggctgacctgcgagtgtgacaagagggctgccctctgctttcgccgcaacctgggcacctacaaccgcaaatatgcccattatcccaacaagctgtgcaccgggcccaccccgccctgc

SEQ ID NO: 6093 - DNA, 1356 bp, Homo Sapiens
tgcccaacccggggctccgtcctcttggcccaagagctaccccagcagctgacatcccccgggtacccagagccgtatggcaaaggccaagagagcagcacggacatcaaggctccagagggctttgctgtgaggctcgtcttccaggacttcgacctggagccgtcccaggactgtgcaggggactctgtcacaatctcattcgtcggttcggatccaagccagttctgtggtcagcaaggctcccctctgggcaggccccctggtcagagggagtttgtatcctcagggaggagtttgcggctgaccttccgcacacagccttcctcggagaacaagactgcccaccttcacaagggctttctggccctctaccaaaccgtggctgtgaactatagtcagcccatcagcgaggccagcaggggctctgaggccatcaacgcacctggagacaaccctgccaaggtccagaaccactgccaggagccctattatcaggccgcggcagcaggggcactcacctgtgcaaccccagggacctggaaagacagacaggatggggaggaggttcttcagtgtatgcctgtctgcggacggccagtcacccccattgcccagaatcagacgaccctcggttcttccagagccaagctgggcaacttcccctggcaagccttcaccagtatccacggccgtgggggcggggccctgctgggggacagatggatcctcactgctgcccacaccgtctaccccaaggacagtgtttctctcaggaagaaccagagtgtgaatgtgttcttgggccacacagccatagatgagatgctgaaactggggaaccaccctgtccaccgtgtcgttgtgcaccccgactaccgtcagaatgagtcccataactttagcggggacatcgccctcctggagctgcagcacagcatccccctgggccccaacgtcctcccggtctgtctgcccgataatgagaccctctaccgcagcggcttgttgggctacgtcagtgggtttggcatggagatgggctggctaactactgagctgaagtactcgaggctgcctgtagctcccagggaggcctgcaacgcctggctccaaaagagacagagacccgaggtgttttctgacaatatgttctgtgttggggatgagacgcaaaggcacagtgtctgccagggggacagtggcagcgtctatgtggtatgggacaatcatgcccatcactgggtggccacgggcattgtgtcctggggcatagggtgtggcgaagggtatgacttctacaccaaggtgctcagctatgtggactggatcaagggagtgatgaatggcaagaat

SEQ ID NO: 6094 - DNA, 198 bp, Homo Sapiens
agtgaggaagctcccctgaggacaggcctggaggacctgcaggacctggacagcctggacacggagaagagcccgctgtatggcctgcagagccgggtggaggagctggtggaggcgccgagggctcagggtgaccgaggcccacgtgctgtcttcctgctcacacgctggcggaaattctggggcgctcccgtgact

SEQ ID NO: 6095 - DNA, 681 bp, Homo Sapiens
ataattggtggccatacgtgcacccggagctcccagccgtggcaggcggccctgctggcgggtcccaggcgccgcttcctctgcggaggcgccctgctttcaggccagtgggtcatcactgctgctcactgcggccgcccgatccttcaggttgccctgggcaagcacaacctgaggaggtgggaggccacccagcaggtgctgcgcgtggttcgtcaggtgacgcaccccaactacaactcccggacccacgacaacgacctcatgctgctgcagctacagcagcccgcacggatcgggagggcagtcaggcccattgaggtcacccaggcctgtgccagccccgggacctcctgccgagtgtcaggctggggaactatatccagccccatcgccaggtaccccgcctctctgcaatgcgtgaacatcaacatctccccggatgaggtgtgccagaaggcctatcctagaaccatcacgcctggcatggtctgtgcaggagttccccagggcgggaaggactcttgtcagggtgactctgggggacccctggtgtgcagaggacagctccagggcctcgtgtcttggggaatggagcgctgcgccctgcctggctaccccggtgtctacaccaacctgtgcaagtacagaagctggattgaggaaacgatgcgggacaaa

SEQ ID NO: 6096 - DNA, 567 bp, Homo Sapiens
agtgcttattactacaccaaagtgatgtctgagctcttcttacatactccatcagacactggagtctcctttcaggccatcagcagcatggcggacttctgggattttgcccagggcccactactggacagtttgtattggaccaaatggtacaacaaccagagcctgggccatggctcccactccttcatctactatgagaacatgctgctgggggttccgaggctgcggcagctaaaggtccgcaatgactcctgtgtggtgcatgaagacttccgggaggacattctgagctgctatgatgtctactctccagacaaagaagaacaactcccctttgggcccttcaatggcacagcgtggacataccactcgcaggatgagttggggggcttctcccactggggcaggctcacaagctacagcggaggtggctactacctggaccttccaggatcccgacagggtagtgcagaggctctccgggcccttcaggaggggctgtggctggacaggggcactcgagtggtgttcatcgacttctcagtctacaatgccaatatcaat

SEQ ID NO: 6097 - DNA, 657 bp, Homo Sapiens
tggtactgctatggattgtgtgccccagccccccagatgttgcgccaccagggtctcctcaagtgccgctgccgcatgctcttcaatgacctgaaggttttcttactgcggcgccctcctcaagcgcccctgcccatgcacggcgacccccagccccccggtttggcggccaacaacacccttccggctctgggcgccggggggtgggcaggctggaggggcccccgagaagtggtgggcagggagccccctcctgtgccacctccaccccccttgccaccttcttctgtggaagatgactggggtggcccagccacagagccacctgcctcgctgctcagcagtgcctcctcagatgacttctgtaaggagaagaccgaggatcgctactcactgggcagcagcttggacagtggtatgaggaccccactctgccgcatctgcttccaggggccagaacagggggagctgctgagcccatgccgctgtgatggctctgtcaagtgcacacaccagccttgcctcatcaagtggatcagcgagcggggctgctggagctgcgagctgtgctactacaagtaccacgtcatcgccataagcacaaaaaatcctctgcagtggcaggccatctctctgacggtcattgagaaggttcag

SEQ ID NO: 6098 - DNA, 2394 bp, Homo Sapiens
ttaccagaactgagtcctcagaaatattttagtacattgcaaccaggaaaagcctctttagcttatttttgtcaagctgattccccaagaacatctgtatttcttgaagaactgaatgaggctgttagacctctgcaggactatggaatttcagttgccaaggttaattgtgtcaaagaagaaatatcaagatactgtggaaaagaaaaggatttgatgaaagcatatttattcaagggcaacatattgctcagagaattccctactgacaccttgtttgatgtgaatgccattgtcgcccatgttctctttgctcttctttttagtgaagtgaaatatattaccaacctggaagaccttcagaacatagaaaatgctctgaaaggaaaagcaaatattatattctcatatgtaagagccattggaataccagagcacagagcagtcatggaagccgcttttgtgtatgggactacataccaatttgtcttaaccacagaaattgcccttttggaaagtattggctctgaggatgtggaatatgcacatctctacttttttcattgtaaactagtcttggacttgacccagcaatgtagaagaacactaatggaacagccattgactacactgaacattcacctgtttattaagacaatgaaagcacctctgttgactgaagttgctgaagatcctcaacaagtttcaactgtccatctccaactgggcttaccactggtttttattgttagccaacaggctacttatgaagctgatagaagaactgcagaatgggttgcttggcgtcttctgggaaaagcaggagttctactcttgttaagggactctttggaagtgaacattcctcaagatgctaatgtggtcttcaaaagagcagaagagggagttccagtggaatttttggtattacatgatgttgatttaataatatctcatgtggaaaataatatgcacattgaggaaatacaagaagatgaagacaatgacatggaaggtccagatatagatgttcaggatgatgaagtggcagaaactgttttcagagataggaagagaaaattacctttggaacttacagtggaactaacagaagaaacatttaatgcaacagtgatggcttctgacagcatagtactcttctatgctggttggcaagcagtatccatggcatttttgcaatcctatattgatgtggcagttaaactgaaaggcacatctactatgcttcttactagaataaactgtgcagattggtctgatgtatgtactaagcaaaatgttactgaatttcctatcataaagatgtacaagaaaggcgagaacccagtatcttatgctggaatgttaggaaccaaagatctcctaaaatttatccagctcaacaggatttcatatccagtgaatataacatcgatccaagaagcagaagaatatttaagtggggaattatataaagacctcatcttgtattctagtgtgtcagtattgggactatttagtccaaccatgaaaacagcaaaagaagattttagtgaagcaggaaactacctaaaaggatatgttatcactggaatttattctgaagaagatgttttgctactgtcaaccaaatatgctgcaagtcttccagccctgctgcttgccagacacacagaaggcaaaatagagagcatcccactagctagcacacatgcacaagacatagttcaaataataacagatgcactactggaaatgtttccggaaatcactgtggaaaatcttcccagttatttcagacttcagaaaccattattgattttgttcagtgatggcactgtaaatcctcaatataaaaaagcaatattgacactggtaaagcagaaatacttggattcatttactccatgctggttaaatctaaagaatactccagtggggagaggaatcttgcgggcatattttgatcctctgcctccccttcctcttcttgttttggtgaatctgcattcaggtggccaagtatttgcatttccttcagaccaggctataattgaagaaaaccttgtattgtggctgaagaaattagaagcaggactagaaaatcatatcacaattttacctgctcaagaatggaaacctcctcttccagcttatgattttctaagtatgatagatgccgcaacatctcaacgtggcactaggaaagttcccaagtgtatgaaagaaacagatgtgcaggagaatgataaggaacaacatgaagataaatcggcagtcagaaaagaaccgattgaaactctgagaataaagcattggaatagaagtaattggtttaaagaagcagaaaaatcatttagacgtgataaagagttaggatgctcaaaagtgaac

SEQ ID NO: 6099 - DNA, 180 bp, Homo Sapiens
gcacctgcccaccggggacgaggaggctggaccctcaatagtgctggctaccttctgggtcccgtcctccaccttccccaaatgggtgaccaagacggaaagagggagacagcccttgagatcctagacctgtggaaggccatcgacgggctcccctactcccaccctccacagccctcc

SEQ ID NO: 6100 - DNA, 594 bp, Homo Sapiens
ctcaatcgcacaggggacccagggcctggcccctccatccagaaaacctatgacctcacccactacctggagcaccaactccgcagcttggctgggacctatctgaactacctgggcccccctttcaacgagccagacttcaaccctccccgcctgggggcagagactctgcccagggccactgttgacttggaggtgtggcgaagcctcaatgacaaactgcggctgacccagaactacgaggcctacagccaccttctgtgttacttgcgtggcctcaaccgtcaggctgccactgctgagctgcgccgcagcctggcccacttctgcaccagcctccagggcctgctgggcagcattgcgggcgtcatggcagctctgggctacccactgccccagccgctgcctgggactgaacccacttggactcctggccctgcccacagtgacttcctccagaagatggacgacttctggctgctgaaggagctgcagacctggctgtggcgctcggccaaggacttcaaccggctcaagaagaagatgcagcctccagcagctgcagtcaccctgcacctgggggctcatggcttc

SEQ ID NO: 6101 - DNA, 231 bp, Homo Sapiens
gactactggctgtactccagcgcgcacatctgcaacggcaccaacctgaccatggacgacgggcccccgccccgccgcgcccgcggcgacctcacccactctggtctgtggcgggtgtgctgcatcgaagggatctataaagggcactgcttccggatcaatcacttcccagaggacaatgactacgaccacgacagctcggagtacctcctccgcatcgtgcgagcctcc

SEQ ID NO: 6102 - DNA, 201 bp, Homo Sapiens
ggcctaaatcaattgtacttctattatgaagaaacgaaagggttaacctgcaaaggcataagatgtgaaaagcagaataatgcattttcaacgttatttgagacactgcagtccctgttttggtcaatatttgggctcatcaatttatatgtgaccaatgtcaaagcacagcatgaatttactgagtttgttggtgccacc

SEQ ID NO: 6103 - DNA, 987 bp, Homo Sapiens
gcgcccgctccgacggcgacctcggctccagtcaagcccggcccggctctcagctacccgcaggaggaggccaccctcaatgagatgttccgcgaggttgaggaactgatggaggacacgcagcacaaattgcgcagcgcggtggaagagatggaggcagaagaagctgctgctaaagcatcatcagaagtgaacctggcaaacttacctcccagctatcacaatgagaccaacacagacacgaaggttggaaataataccatccatgtgcaccgagaaattcacaagataaccaacaaccagactggacaaatggtcttttcagagacagttatcacatctgtgggagacgaagaaggcagaaggagccacgagtgcatcatcgacgaggactgtgggcccagcatgtactgccagtttgccagcttccagtacacctgccagccatgccggggccagaggatgctctgcacccgggacagtgagtgctgtggagaccagctgtgtgtctggggtcactgcaccaaaatggccaccaggggcagcaatgggaccatctgtgacaaccagagggactgccagccggggctgtgctgtgccttccagagaggcctgctgttccctgtgtgcacacccctgcccgtggagggcgagctttgccatgaccccgccagccggcttctggacctcatcacctgggagctagagcctgatggagccttggaccgatgcccttgtgccagtggcctcctctgccagccccacagccacagcctggtgtatgtgtgcaagccgaccttcgtggggagccgtgaccaagatggggagatcctgctgcccagagaggtccccgatgagtatgaagttggcagcttcatggaggaggtgcgccaggagctggaggacctggagaggagcctgactgaagagatggcgctgggggagcctgcggctgccgccgctgcactgctgggaggggaagagatt

SEQ ID NO: 6104 - DNA, 726 bp, Homo Sapiens
ctgcccaagagctgggactggcgcaatgtggatggtgtcaactatgccagcatcacccggaaccagcacatcccccaatactgcggctcctgctgggcccacgccagcaccagcgctatggcggatcggatcaacatcaagaggaagggagcgtggccctccaccctcctgtccgtgcagaacgtcatcgactgcggtaacgctggctcctgtgaagggggtaatgacctgtccgtgtgggactacgcccaccagcacggcatccctgacgagacctgcaacaactaccaggccaaggaccaggagtgtgacaagtttaaccaatgtgggacatgcaatgaattcaaagagtgccacgccatccggaactacaccctctggagggtgggagactacggctccctctctgggagggagaagatgatggcagaaatctacgcaaatggtcccatcagctgtggaataatggcaacagaaagactggctaactacaccggaggcatctatgccgaataccaggacaccacatatataaaccatgtcgtttctgtggctgggtggggcatcagtgatgggactgagtactggattgtccggaattcatggggtgaaccatggggcgagagaggctggctgaggatcgtgaccagcacctataaggatgggaagggcgccagatacaaccttgccatcgaggagcactgtacatttggggaccccatcgtt

SEQ ID NO: 6105 - DNA, 600 bp, Homo Sapiens
tcaaaaagctactatgatatcttaggtgtgccaaaatcggcatcagagcgccaaatcaagaaggcctttcacaagttggccatgaagtaccaccctgacaaaaataagagcccagatgctgaagcaaaattcagagagattgcagaagcatatgaaacactctcagatgctaatagacgaaaagagtatgatacacttggacacagtgcttttactagtggtaaaggacaaagaggtagtggaagttcttttgagcagtcatttaacttcaattttgatgacttatttaaagactttggcttttttggtcaaaaccaaaacactggatccaagaagcgttttgaaaatcatttccagacacgccaggatggtggttccagtagacaaaggcatcatttccaagaattttcttttggaggtggattatttgatgacatgtttgaagatatggagaaaatgttttcttttagtggttttgactctaccaatcagcatacagtacagactgaaaatagatttcatggatctagcaagcactgcaggactgtcactcaacgaagaggaaatatggttactacatacactgactgttcaggacag

SEQ ID NO: 6106 - DNA, 1008 bp, Homo Sapiens
ggacgagatttctataagatcttgggggtgcctcgaagtgcctctataaaggatattaaaaaggcctataggaaactagccctgcagcttcatcccgaccggaaccctgatgatccacaagcccaggagaaattccaggatctgggtgctgcttatgaggttctgtcagatagtgagaaacggaaacagtacgatacttatggtgaagaaggattaaaagatggtcatcagagctcccatggagacattttttcacacttctttggggattttggtttcatgtttggaggaacccctcgtcagcaagacagaaatattccaagaggaagtgatattattgtagatctagaagtcactttggaagaagtatatgcaggaaattttgtggaagtagttagaaacaaacctgtggcaaggcaggctcctggcaaacggaagtgcaattgtcggcaagagatgcggaccacccagctgggccctgggcgcttccaaatgacccaggaggtggtctgcgacgaatgccctaatgtcaaactagtgaatgaagaacgaacgctggaagtagaaatagagcctggggtgagagacggcatggagtacccctttattggagaaggtgagcctcacgtggatggggagcctggagatttacggttccgaatcaaagttgtcaagcacccaatatttgaaaggagaggagatgatttgtacacaaatgtgacaatctcattagttgagtcactggttggctttgagatggatattactcacttggatggtcacaaggtacatatttcccgggataagatcaccaggccaggagcgaagctatggaagaaaggggaagggctccccaactttgacaacaacaatatcaagggctctttgataatcacttttgatgtggattttccaaaagaacagttaacagaggaagcgagagaaggtatcaaacagctactgaaacaagggtcagtgcagaaggtatacaatggactgcaaggatat

SEQ ID NO: 6107 - DNA, 618 bp, Homo Sapiens
ctggtcctggacttcaacaacatcaggagctctgctgacctgcatggggcccggaagggctcacagtgcctgtctgacacggactgcaataccagaaagttctgcctccagccccgcgatgagaagccgttctgtgctacatgtcgtgggttgcggaggaggtgccagcgagatgccatgtgctgccctgggacactctgtgtgaacgatgtttgtactacgatggaagatgcaaccccaatattagaaaggcagcttgatgagcaagatggcacacatgcagaaggaacaactgggcacccagtccaggaaaaccaacccaaaaggaagccaagtattaagaaatcacaaggcaggaagggacaagagggagaaagttgtctgagaacttttgactgtggccctggactttgctgtgctcgtcatttttggacgaaaatttgtaagccagtccttttggagggacaggtctgctccagaagagggcataaagacactgctcaagctccagaaatcttccagcgttgcgactgtggccctggactactgtgtcgaagccaattgaccagcaatcggcagcatgctcgattaagagtatgccaaaaaatagaaaagcta

SEQ ID NO: 6108 - DNA, 678 bp, Homo Sapiens
aaactcaactccatcaagtcctctctgggcggggagacgcctggtcaggccgccaatcgatctgcgggcatgtaccaaggactggcattcggcggcagtaagaagggcaaaaacctggggcaggcctacccttgtagcagtgataaggagtgtgaagttgggaggtattgccacagtccccaccaaggatcatcggcctgcatggtgtgtcggagaaaaaagaagcgctgccaccgagatggcatgtgctgccccagtacccgctgcaataatggcatctgtatcccagttactgaaagcatcttaacccctcacatcccggctctggatggtactcagcacagagatcgaaaccacggtcattactcaaaccatgacttgggatggcagaatctaggaagaccacacactaagatgtcacatataaaagggcatgaaggagacccctgcctacgatcatcagactgcattgaagggttttgctgtgctcgtcatttctggaccaaaatctgcaaaccagtgctccatcagggggaagtctgtaccaaacaacgcaagaagggttctcatgggctggaaattttccagcgttgcgactgtgcgaagggcctgtcttgcaaagtatggaaagatgccacctactcctccaaagccagactccatgtgtgtcagaaaatt

SEQ ID NO: 6109 - DNA, 1008 bp, Homo Sapiens
aactggatgtggttgggcattgcctccttcggggttccagagaagctgggctgcgccaatttgccgctgaacagccgccagaaggagctgtgcaagaggaaaccgtacctgctgccgagcatccgagagggcgcccggctgggcattcaggagtgcgggagccagttcagacacgagagatggaactgcatgatcaccgccgccgccactaccgccccgatgggcgccagccccctctttggctacgagctgagcagcggcaccaaagagacagcatttatttatgctgtgatggctgcaggcctggtgcattctgtgaccaggtcatgcagtgcaggcaacatgacagagtgttcctgtgacaccaccttgcagaacggcggctcagcaagtgaaggctggcactgggggggctgctccgatgatgtccagtatggcatgtggttcagcagaaagttcctagatttccccatcggaaacaccacgggcaaagaaaacaaagtactattagcaatgaacctacataacaatgaagctggaaggcaggctgtcgccaagttgatgtcagtagactgccgctgccacggagtttccggctcctgtgctgtgaaaacatgctggaaaaccatgtcttcttttgaaaagattggccatttgttgaaggataaatatgaaaacagtatccagatatcagacaaaacaaagaggaaaatgcgcaggagagaaaaagatcagaggaaaataccaatccataaggatgatctgctctatgttaataagtctcccaactactgtgtagaagataagaaactgggaatcccagggacacaaggcagagaatgcaaccgtacatcagagggtgcagatggctgcaacctcctctgctgtggccgaggttacaacacccatgtggtcaggcacgtggagaggtgtgagtgtaagttcatctggtgctgctatgtccgttgcaggaggtgtgaaagcatgactgatgtccacacttgcaag

SEQ ID NO: 6110 - DNA, 1368 bp, Homo Sapiens
gtccaagttctgaatctgcaggcgcggctccgggtcctggagatgtatttcctcaatgacactctggcggctgaggacagcccgtccttctccttgctgcagtcagcacaccctggagaacacctggctcagggtgcatcgaggctgcaagtcctgcaggcccaactcacctgggtccgcgtcagccatgagcacttgctgcagcgggtagacaacttcactcagaacccagggatgttcagaatcaaaggtgaacaaggcgccccaggtcttcaaggccacaagggggccatgggcatgcctggtgcccctggcccgccgggaccacctgctgagaagggagccaagggggctatgggacgagatggagcaacaggcccctcgggaccccaaggcccaccgggagtcaagggagaggcgggcctccaaggaccccagggtgctccagggaagcaaggagccactggcaccccaggaccccaaggagagaagggcagcaaaggcgatgggggtctcattggcccaaaaggggaaactggaactaagggagagaaaggagacctgggtctcccaggaagcaaaggggacaggggcatgaaaggagatgcaggggtcatggggcctcctggagcccaggggagtaaaggtgacttcgggaggccaggcccaccaggtttggctggttttcctggagctaaaggagatcaaggacaacctggactgcagggtgttccgggccctcctggtgcagtgggacacccaggtgccaagggtgagcctggcagtgctggctcccctgggcgagcaggacttccagggagccccgggagtccaggagccacaggcctgaaaggaagcaaaggggacacaggacttcaaggacagcaaggaagaaaaggagaatcaggagttccaggccctgcaggtgtgaagggagaacaggggagcccagggctggcaggtcccaagggagcccctggacaagctggccagaagggagaccagggagtgaaaggatcttctggggagcaaggagtaaagggagaaaaaggtgaaagaggtgaaaactcagtgtccgtcaggattgtcggcagtagtaaccgaggccgggctgaagtttactacagtggtacctgggggacaatttgcgatgacgagtggcaaaattctgatgccattgtcttctgccgcatgctgggttactccaaaggaagggccctgtacaaagtgggagctggcactgggcagatctggctggataatgttcagtgtcggggcacggagagtaccctgtggagctgcaccaagaatagctggggccatcatgactgcagccacgaggaggacgcaggcgtggagtgcagcgtc

SEQ ID NO: 6111 - DNA, 636 bp, Homo Sapiens
gcagatggaaaatatgctcagaagttgtttaatgacctttttgaagattattctaatgctcttcgtccagtggaagatacagataaagtcctgaatgtgaccctgcagattacgctctctcagattaaggatatggatgaaagaaaccaaattctgactgcttatttgtggatccgccaaatctggcacgatgcctatctcacgtgggaccgagatcagtacgatggcctagactccatcaggatccccagtgacctcgtgtggaggccagacatcgtcttatataacaaggctgatgatgaatcttcagagcctgtgaacaccaatgtggtcctgcggtatgatgggctgatcacctgggatgcaccggccatcaccaaaagctcctgtgtggtggatgtcacctacttcccttttgacaaccagcagtgcaacctgacttttggttcctggacctacaatggcaatcaggtggacatattcaacgccttggacagcggagatctctctgacttcattgaagatgtggaatgggaggtccatggcatgcccgctgtgaagaatgtgatctcctatggctgctgctctgagccttacccggatgtcacattcaccctccttctgaagaggaggtcc

SEQ ID NO: 6112 - DNA, 1140 bp, Homo Sapiens
gagagggtgcgctactacagggagttccaccaccagactgccctggatgagcgagaaagccaccggctcatcttcccggctgtcaccctgtgcaacatcaacccactgcgccgctcgcgcctaacgcccaacgacctgcactgggctgggtctgcgctgctgggcctggatcccgcagagcacgccgccttcctgcgcgccctgggccggccccctgcaccgcccggcttcatgcccagtcccacctttgacatggcgcaactctatgcccgtgctgggcactccctggatgacatgctgctggactgtcgcttccgtggccaaccttgtgggcctgagaacttcaccacgatcttcacccggatgggaaagtgctacacatttaactctggcgctgatggggcagagctgctcaccactactaggggtggcatgggcaatgggctggacatcatgctggacgtgcagcaggaggaatatctacctgtgtggagggacaatgaggagaccccgtttgaggtggggatccgagtgcagatccacagccaggaggagccgcccatcatcgatcagctgggcttgggggtgtccccgggctaccagacctttgtttcttgccagcagcagcagctgagcttcctgccaccgccctggggcgattgcagttcagcatctctgaaccccaactatgagccagagccctctgatcccctaggctcccccagccccagccccagccctccctatacccttatggggtgtcgcctggcctgcgaaacccgctacgtggctcggaagtgcggctgccgaatggtgtacatgccaggcgacgtgccagtgtgcagcccccagcagtacaagaactgtgcccacccggccatagatgccatgcttcgcaaggactcgtgcgcctgccccaacccgtgcgccagcacgcgctacgccaaggagctctccatggtgcggatcccgagccgcgccgccgcgcgcttcctggcccggaagctcaaccgcagcgaggcctacatcgcggagaacgtgctggccctggacatcttctttgaggccctcaactatgagaccgtggagcagaagaaggcctatgagatgtcagagctgcttggtgacattgggggccag

SEQ ID NO: 6113 - DNA, 1434 bp, Homo Sapiens
gccgagctgcgtgctccgccagataaaatcgcgattattggagccggaattggtggcacttcagcagcctattacctgcggcagaaatttgggaaagatgtgaagatagacctgtttgaaagagaagaggtcgggggccgcctggctaccatgatggtgcaggggcaagaatacgaggcaggaggttctgtcatccatcctttaaatctgcacatgaaacgttttgtcaaagacctgggtctctctgctgttcaggcctctggtggcctactggggatatataatggagagactctggtatttgaggagagcaactggttcataattaacgtgattaaattagtttggcgctatggatttcaatccctccgtatgcacatgtgggtagaggacgtgttagacaagttcatgaggatctaccgctaccagtctcatgactatgccttcagtagtgtcgaaaaattacttcatgctctaggaggagatgacttccttggaatgcttaatcgaacacttcttgaaaccttgcaaaaggccggcttttctgagaagttcctcaatgaaatgattgctcctgttatgagggtcaattatggccaaagcacggacatcaatgcctttgtgggggcggtgtcactgtcctgttctgattctggcctttgggcagtagaaggtggcaataaacttgtttgctcagggcttctgcaggcatccaaaagcaatcttatatctggctcagtaatgtacatcgaggagaaaacaaagaccaagtacacaggaaatccaacaaagatgtatgaagtggtctaccaaattggaactgagactcgttcagacttctatgacatcgtcttggtggccactccgttgaatcgaaaaatgtcgaatattacttttctcaactttgatcctccaattgaggaattccatcaatattatcaacatatagtgacaactttagttaagggggaattgaatacatctatctttagctctagacccatagataaatttggccttaatacagttttaaccactgataattcagatttgttcattaacagtattgggattgtgccctctgtgagagaaaaggaagatcctgagccatcaacagatggaacatatgtttggaagatcttttcccaagaaactcttactaaagcacaaattttaaagctctttctgtcctatgattatgctgtgaagaagccatggcttgcatatcctcactataagcccccggagaaatgcccctctatcattctccatgatcgactttattacctcaatggcatagagtgtgcagcaagtgccatggagatgagtgccattgcagcccacaacgctgcactccttgcctatcaccgctggaacgggcacacagacatgattgatcaggatggcttatatgagaaacttaaaactgaacta

SEQ ID NO: 6114 - DNA, 2145 bp, Homo Sapiens
tttgtgtccagtcaccgctatgtggaaaccatgcttgtggcagaccagtcgatggcagaattccacggcagtggtctaaagcattaccttctcacgttgttttcggtggcagccagattgtacaaacaccccagcattcgtaattcagttagcctggtggtggtgaagatcttggtcatccacgatgaacagaaggggccggaagtgacctccaatgctgccctcactctgcggaacttttgcaactggcagaagcagcacaacccacccagtgaccgggatgcagagcactatgacacagcaattcttttcaccagacaggacttgtgtgggtcccagacatgtgatactcttgggatggctgatgttggaactgtgtgtgatccgagcagaagctgctccgtcatagaagatgatggtttacaagctgccttcaccacagcccatgaattaggccacgtgtttaacatgccacatgatgatgcaaagcagtgtgccagccttaatggtgtgaaccaggattcccacatgatggcgtcaatgctttccaacctggaccacagccagccttggtctccttgcagtgcctacatgattacatcatttctggataatggtcatggggaatgtttgatggacaagcctcagaatcccatacagctcccaggcgatctccctggcacctcgtacgatgccaaccggcagtgccagtttacatttggggaggactccaaacactgccctgatgcagccagcacatgtagcaccttgtggtgtaccggcacctctggtggggtgctggtgtgtcaaaccaaacacttcccgtgggcggatggcaccagctgtggagaagggaaatggtgtatcaacggcaagtgtgtgaacaaaaccgacagaaagcattttgatacgccttttcatggaagctggggaatgtgggggccttggggagactgttcgagaacgtgcggtggaggagtccagtacacgatgagggaatgtgacaacccagtcccaaagaatggagggaagtactgtgaaggcaaacgagtgcgctacagatcctgtaaccttgaggactgtccagacaataatggaaaaacctttagagaggaacaatgtgaagcacacaacgagttttcaaaagcttcctttgggagtgggcctgcggtggaatggattcccaagtacgctggcgtctcaccaaaggacaggtgcaagctcatctgccaagccaaaggcattggctacttcttcgttttgcagcccaaggttgtagatggtactccatgtagcacagattccacctctgtctgtgtgcaaggacagtgtgtaaaagctggttgtgatcgcatcatagactccaaaaagaagtttgataaatgtggtgtttgcgggggaaatggatctacttgtaaaaaaatatcaggatcagttactagtgcaaaacctggatatcatgatatcatcacaattccaactggagccaccaacatcgaagtgaaacagcggaaccagaggggatccaggaacaatggcagctttcttgccatcaaagctgctgatggcacatatattcttaatggtgactacactttgtccaccttagagcaagacattatgtacaaaggtgttgtcttgaggtacagcggctcctctgcggcattggaaagaattcgcagctttagccctctcaaagagcccttgaccatccaggttcttactgtgggcaatgcccttcgacctaaaattaaatacacctacttcgtaaagaagaagaaggaatctttcaatgctatccccactttttcagcatgggtcattgaagagtggggcgaatgttctaagtcatgtgaattgggttggcagagaagactggtagaatgccgagacattaatggacagcctgcttccgagtgtgcaaaggaagtgaagccagccagcaccagaccttgtgcagaccatccctgcccccagtggcagctgggggagtggtcatcatgttctaagacctgtgggaagggttacaaaaaaagaagcttgaagtgtctgtcccatgatggaggggtgttatctcatgagagctgtgatcctttaaagaaacctaaacatttcatagacttttgcacaatggcagaatgcagt

SEQ ID NO: 6115 - DNA, 1401 bp, Homo Sapiens
gccccggaccccggcttccaggagcgcttcttccagcagcgtctggaccacttcaacttcgagcgcttcggcaacaagaccttccctcagcgcttcctggtgtcggacaggttctgggtccggggcgaggggcccatcttcttctacactgggaacgagggcgacgtgtgggccttcgccaacaactcgggcttcgtcgcggagctggcggccgagcggggggctctactggtcttcgcggagcaccgctactacgggaagtcgctgccgttcggtgcgcagtccacgcagcgcgggcacacggagctgctgacggtggagcaggccctggccgacttcgcagagctgctccgcgcgctacgacgcgacctcggggcccaggatgcccccgccatcgccttcggtggaagttatggggggatgctcagtgcctacctgaggatgaagtatccccacctggtggcgggggcgctggcggccagcgcgcccgttctagctgtggcaggcctcggcgactccaaccagttcttccgggacgtcacggcggactttgagggccagagtcccaaatgcacccagggtgtgcgggaagcgttccgacagatcaaggacttgttcctacagggagcctacgacacggtccgctgggagttcggcacctgccagccgctgtcagacgagaaggacctgacccagctcttcatgttcgcccggaatgccttcaccgtgctggccatgatggactacccctaccccactgacttcctgggtcccctccctgccaaccccgtcaaggtgggctgtgatcggctgctgagtgaggcccagaggatcacggggctgcgagcactggcagggctggtctacaacgcctcgggctccgagcactgctacgacatctaccggctctaccacagctgtgctgaccccactggctgcggcaccggccccgacgccagggcctgggactaccaggcctgcaccgagatcaacctgaccttcgccagcaacaatgtgaccgatatgttccccgacctgcccttcactgacgagctccgccagcggtactgcctggacacctggggcgtgtggccccggcccgactggctgctgaccagcttctgggggggtgatcttagagccgccagcaacatcatcttctccaacgggaacctggacccctgggcagggggcgggattcggaggaacctgagtgcctcagtcatcgccgtcaccatccaggggggagcgcaccacctcgacctcagagcctcccacccagaagatcctgcttccgtggttgaggcgcggaagctggaggccaccatcatcggcgagtgggtaaaggcagccaggcgtgagcagcagccagctctgcgtggggggcccagactcagcctc

SEQ ID NO: 6116 - DNA, 216 bp, Homo Sapiens
atgaaccctccttcggggccaagagtcctgcccagcccaacccaagagcccagctgcatggccaccccagcaccacccagctggtgggacagctcccagagcagcatctccagcctgggccggcttccatccatcagtcccacagcacctgggacttgggctgctgcctgggtccccctccccacggttgatgttccagaccatgcccactatacc

SEQ ID NO: 6117 - DNA, 1038 bp, Homo Sapiens
gcaggggaagccccgggggcgctgtccactgctgatcccgccgaccagagcgtccagtgtgtccccaaggccacctgtccttccagccggcctcgccttctctggcagaccccgaccacccagacactgccctcgaccaccatggagacccaattcccagtttctgaaggcaaagtcgacccataccgctcctgtggcttttcctacgagcaggaccccaccctcagggacccagaagccgtggctcggcggtggccctggatggtcagcgtgcgggccaatggcacacacatctgtgccggcaccatcattgcctcccagtgggtgctgactgtggcccactgcctgatctggcgtgatgttatctactcagtgagggtggggagtccgtggattgaccagatgacgcagaccgcctccgatgtcccggtgctccaggtcatcatgcatagcaggtaccgggcccagcggttctggtcctgggtgggccaggccaacgacatcggcctcctcaagctcaagcaggaactcaagtacagcaattacgtgcggcccatctgcctgcctggcacggactatgtgttgaaggaccattcccgctgcactgtgacgggctggggactttccaaggctgacggcatgtggcctcagttccggaccattcaggagaaggaagtcatcatcctgaacaacaaagagtgtgacaatttctaccacaacttcaccaaaatccccactctggttcagatcatcaagtcccagatgatgtgtgcggaggacacccacagggagaagttctgctatgagctaactggagagcccttggtctgctccatggagggcacgtggtacctggtgggattggtgagctggggtgcaggctgccagaagagcgaggccccacccatctacctacaggtctcctcctaccaacactggatctgggactgcctcaacgggcaggccctggccctgccagccccatccaggaccctgctcctggcactcccactgcccctcagcctccttgctgccctc

SEQ ID NO: 6118 - DNA, 924 bp, Homo Sapiens
agcagtaataacttcaactacggggcttaccattccctggaagctatttaccacgagatggacaacattgccgcagactttcctgacctggcgaggagggtgaagattggacattcgtttgaaaaccggccgatgtatgtactgaagttcagcactgggaaaggcgtgaggcggccggccgtttggctgaatgcaggcatccattcccgagagtggatctcccaggccactgcaatctggacggcaaggaagattgtatctgattaccagagggatccagctatcacctccatcttggagaaaatggatattttcttgttgcctgtggccaatcctgatggatatgtgtatactcaaactcaaaaccgattatggaggaagacgcggtcccgaaatcctggaagctcctgcattggtgctgacccaaatagaaactggaacgctagttttgcaggaaagggagccagcgacaacccttgctccgaagtgtaccatggaccccacgccaattcggaagtggaggtgaaatcagtggtagatttcatccaaaaacatgggaatttcaagggcttcatcgacctgcacagctactcgcagctgctgatgtatccatatgggtactcagtcaaaaaggccccagatgccgaggaactcgacaaggtggcgaggcttgcggccaaagctctggcttctgtgtcgggcactgagtaccaagtgggtcccacctgcaccactgtctatccagctagcgggagcagcatcgactgggcgtatgacaacggcatcaaatttgcattcacatttgagttgagagataccgggacttatggcttcctcctgccagctaaccagatcatccccactgcagaggagacgtggctggggctgaagaccatcatggagcatgtgcgggacaacctctac

SEQ ID NO: 6119 - DNA, 303 bp, Homo Sapiens
ctcttcctgggctgcgacactggccctgtggctggggttactgttccctatggaaacagcacagcacctggctcagccctggacccctactcgccctgcaataataactgtgaatgccaaaccgattccttcactccagtgtgtggggcagatggcatcacctacctgtctgcctgctttgctggctgcaacagcacgaatctcacgggctgtgcgtgcctcaccaccgtccctgctgagaacgcaaccgtggttcctggaaaatgccccagtcctgggtgccaagaggccttcctcactttc

SEQ ID NO: 6120 - DNA, 1605 bp, Homo Sapiens
cagatctacttcggggacccccagatcttccagcagggtgccgtggtgaccgatgctgcccgctgcacttcactgggcatcgaggtgctcagtaaacagggatcttctgtggacgcagcggtggcagtagccttgtgtttgggtatcgtggctccacacagttctggcctgggcggtgggggcgtgatgctggtacatgtcatccgacgaaatgagagccacctaattgatttccgggagtccgcaccaggggccctcagggaagagaccctgcaaagatcctgggagaccaagcctgggctcttggtgggggttcccggaatggtgaaggggctacatgaagctcaccagctctatggcaggctgccatggtcccaagtcctggcctttgcagcagctgtggcccaagatggcttcaacgtgactcatgatctagcccgtgccctggctgaacagctgccacccaacatgtccgagcgcttccgggagacgttcctgccatcgggccgcccgccactacctggctcgttgctgcatcggcccgacctggctgaggtgctggatgtacttggcacctccggcccggctgccttctacgcaggtggcaacctcacactggagatggtggccgaggctcagcacgcagggggtgtcataaccgaagaggacttcagcaattacagcgcccttgtggagaagcctgtgtgtggcgtgtacagaggccacctggttcttagtcccccacctccgcacacgggccctgccctcatcagtgctctcaacatcctggagggcttcaatctcaccagcctggtatcccgagaacaggctcttcactgggtggcagagaccctgaagattgcattagccctggccagcagactgggagatcccgtctatgattctaccatcactgagagcatggatgacatgctcagcaaggtggaggccgcctacctccggggccatatcaatgactcccaggcagcccctgccccactcctgcctgtctatgaactagacggagctcccacggctgcccaggtgctgatcatgggacctgatgacttcattgtggccatggttagctccctgaaccagccctttggcagcggccttatcaccccctcggggatactgctcaacagccagatgctggacttctcctggcccaaccggacagctaaccactctgcacccagcctggagaattcagtgcagccagggaagcggccactctctttcctgctgcccacagtggtccgacccgcggaggggctctgtggaacctacctcgctctgggggccaatggagctgcgcggggcctcagcggcctgacacaggttctgctgaatgtcctgaccttgaaccggaacctgagtgacagcctggcccgcggccgcctacacccggacctgcagtccaacctcctgcaggtggacagtgagttcacagaggaagagattgagttcctggaagccaggggtcaccacgtggagaaagtagatgtcttatcctgggtccatggcagccgaaggaccaacaacttcatcatcgctgttaaggaccctcggagcccagatgcagctggagccaccatcctg

SEQ ID NO: 6121 - DNA, 1221 bp, Homo Sapiens
ccagaccagcaaaaggttctactagtttcttttgatggattccgttgggattacttatataaagttccaacgccccattttcattatattatgaaatatggtgttcacgtgaagcaagttactaatgtttttattacaaaaacctaccctaaccattatactttggtaactggcctctttgcagagaatcatgggattgttgcaaatgatatgtttgatcctattcggaacaaatctttctccttggatcacatgaatatttatgattccaagttttgggaagaagcgacaccaatatggatcacaaaccagagggcaggacatactagtggtgcagccatgtggcccggaacagatgtaaaaatacataagcgctttcctactcattacatgccttacaatgagtcagtttcatttgaagatagagttgccaaaattattgaatggtttacgtcaaaagagcccataaatcttggtcttctctattgggaagaccctgatgacatgggccaccatttgggacctgacagtccgctcatggggcctgtcatttcagatattgacaagaagttaggatatctcatacaaatgctgaaaaaggcaaagttgtggaacactctgaacctaatcatcacaagtgatcatggaatgacgcagtgctctgaggaaaggttaatagaacttgaccagtacctggataaagaccactataccctgattgatcaatctccagtagcagccatcttgccaaaagaaggtaaatttgatgaagtctatgaagcactaactcacgctcatcctaatcttactgtttacaaaaaagaagacgttccagaaaggtggcattacaaatacaacagtcgaattcaaccaatcatagcagtggctgatgaagggtggcacattttacagaataagtcagatgactttctgttaggcaaccacggttacgataatgcgttagcagatatgcatccaatatttttagcccatggtcctgccttcagaaagaatttctcaaaagaagccatgaactccacagatttgtacccactactatgccacctcctcaatatcaccgccatgccacacaatggatcattctggaatgtccaggatctgctcaattcagcaatgccaagggtggtcccttatacacagagtactatactcctccctggtagtgttaaaccagcagaatatgaccaagaggggtcatac

SEQ ID NO: 6122 - DNA, 840 bp, Homo Sapiens
gcgaagatgaaggtggtggaggagcccaacgcgtttggggtgaacaacccgttcttgcctcaggccagtcgcctccaggccaagagagatccttcacccgtgtctggacccgtgcatctcttccgactctcgggcaagtgcttcagcctggtggagtccacgtacaagtatgagttctgcccgttccacaacgtgacccagcacgagcagaccttccgctggaacgcctacagtgggatcctcggcatctggcacgagtgggagatcgccaacaacaccttcacgggcatgtggatgagggacggtgacgcctgccgttcccggagccggcagagcaaggtggagctggcgtgtggaaaaagcaaccggctggcccatgtgtccgagccgagcacctgcgtctacgcgctgacgttcgagacccccctcgtctgccacccccacgccttgctagtgtacccaaccctgccagaggccctgcagcggcagtgggaccaggtagagcaggacctggccgatgagctgatcaccccccagggccatgagaagttgctgaggacactttttgaggatgctggctacttaaagaccccagaaaatgaacccacccagctggagggaggtcctgacagcttggggtttgagaccctggaaaactgcaggaaggctcataaagaactctcaaaggagatcaaaaggctgaaaggtttgctcacccagcacggcatcccctacacgaggcccacagaaacttccaacttggagcacttgggccacgagacgcccagagccaagtctccagagcagctgcggggtgacccaggactgcgtgggagtttg

SEQ ID NO: 6123 - DNA, 618 bp, Homo Sapiens
gaacaagaagtggaaaatctctcaggcctttccactaaccctgaaaaagatatatttgtggtgcgggaaaatgggacgacgtgtctcatggcagagtttgcagccaaatttattgtaccttatgatgtgtgggccagcaactacgtagatctgatcacagaacaggccgatatcgcattgacccggggagctgaggtgaagggccgctgtggccacagccagtcggagctgcaagtgttctgggtggatcgcgcatatgcactcaaaatgctctttgtaaaggaaagccacaacatgtccaagggacctgaggcgacttggaggctgagcaaagtgcagtttgtctacgactcctcggagaaaacccacttcaaagacgcagtcagtgctgggaagcacacagccaactcgcaccacctctctgccttggtcacccccgctgggaagtcctatgagtgtcaagctcaacaaaccatttcactggcctctagtgatccgcagaagacggtcaccatgatcctgtctgcggtccacatccaaccttttgacattatctcagattttgtcttcagtgaagagcataaatgcccagtggatgagcgggagcaactggaagaa

SEQ ID NO: 6124 - DNA, 1428 bp, Homo Sapiens
atgtggaccggatataagatcttaatcttctcttatcttactacagaaatctggatggagaagcggtatttatctcaaagagaagtggacctagaggcttatttcactaggaatcacaccgttttgcaaggtactcgattcaaaagagccattttccaagggcaatactgtagaaattttggctgttgtgaagacagagatgatggctgtgtcactgagttctatgcggcgaatgcgttgtgctactgtgataaattctgtgacagagaaaattctgattgctgtcctgactacaagtccttttgccgtgaagagaaagaatggcctcctcacacacagccttggtatccagaaggttgcttcaaagatggtcaacattatgaagagggatcagtaattaaagaaaactgcaactcctgcacatgctcaggacagcaatggaaatgttcccagcatgtatgccttgttcgttcagaattaattgaacaggtcaataaaggagactatggatggacagcacagaattacagccaattttggggaatgactttagaagatggttttaaatttcgccttggcactttgccacctagtctcatgctcctgagcatgaatgaaatgacagcttctttacctgcaacaactgatcttccagagttttttgttgcttcttataaatggcctggatggactcatggcccattggatcaaaaaaattgtgctgcatcctgggcattttccactgcaagtgtggctgctgaccgaatagcaattcagtctaagggtcgatacacggccaatctatcccctcagaatttgatctcttgctgtgccaagaaccgtcatggatgcaatagtggaagcatcgatagggcttggtggtacctgagaaaacgtggactggtatcccacgcatgctacccacttttcaaagaccaaaatgctaccaacaatggatgtgccatggcaagcaggtctgatgggcgaggaaaacggcatgccacgaagccatgtcccaacaacgtagaaaaatctaacaggatctatcaatgttctcctccatacagagtctcttccaacgaaactgagataatgaaagaaatcatgcaaaatggaccagttcaagccataatgcaagtccatgaagatttcttccattataagacagggatatacagacatgttaccagcacaaataaagaatcagaaaaatatcgaaagcttcagacacatgcagtcaaactcactggatggggcacactgagaggagcacaagggcagaaagaaaaattttggattgctgccaattcctggggaaagtcatggggagagaatggctatttcaggattcttcgaggagtaaatgagtccgacattgaaaagttgattatcgcagcttggggccaactgacgagttctgatgaacca

SEQ ID NO: 6125 - DNA, 729 bp, Homo Sapiens
gcgccgtccgcccgcgatcccttcgccccccagctcggggacacgcagaactgccagctgcggtgccgcgaccgcgacctcggcccgcagccctcgcaggcggggctggagggcgcctccgagtctccctatgacagagccgttctgatcagcgcttgcgagcgtggctgccgcctcttctccatctgccgatttgtggccagaagctccaagcccaatgccacccaaactgagtgtgaagcagcctgcgtggaagcctatgtgaaggaggcagagcagcaggcctgtagccacggctgctggagccagcccgcggagcctgagccggagcagaagagaaaggtcctggaggctccaagtggggccctctccctcttggacttgttttccaccctctgcaatgacctcgtcaactcagcccagggatttgtctcctccacctggacatactacttgcagactgacaatgggaaagtggtggtgtttcagactcagcccatagtggagagcctcggcttccaggggggccgtctgcagcgcgtggaggtgacctggcgaggctcccaccctgaagccctggaggtgcacgtggaccctgtaggccccctggacaaggtgaggaaggccaagatccgagtcaagaccagcagcaaggccaaggtggagtctgaagagccacaggacaatgacttcctcagttgcatgtcccggcgctcgggtctgcctcgc

SEQ ID NO: 6126 - DNA, 1269 bp, Homo Sapiens
ttggcccccagtcctcagtcgccagagaccccagcccctcagaaccagaccagcagggtagtgcaggctcccaaggaggaagaggaagatgagcaggaggccagcgaggagaaggccagtgaggaagagaaagcctggctgatggccagcaggcagcagcttgccaaggagacttcaaacttcggattcagcctgctgcgaaagatctccatgaggcacgatggcaacatggtcttctctccatttggcatgtccttggccatgacaggcttgatgctgggggccacagggccgactgaaacccagatcaagagagggctccacttgcaggccctgaagcccaccaagcccgggctcctgccttccctctttaagggactcagagagaccctctcccgcaacctggaactgggcctcacacaggggagttttgccttcatccacaaggattttgatgtcaaagagactttcttcaatttatccaagaggtattttgatacagagtgcgtgcctatgaattttcgcaatgcctcacaggccaaaaggctcatgaatcattacattaacaaagagactcgggggaaaattcccaaactgtttgatgagattaatcctgaaaccaaattaattcttgtggattacatcttgttcaaagggaaatggttgaccccatttgaccctgtcttcaccgaagtcgacactttccacctggacaagtacaagaccattaaggtgcccatgatgtacggtgcaggcaagtttgcctccacctttgacaagaattttcgttgtcatgtcctcaaactgccctaccaaggaaatgccaccatgctggtggtcctcatggagaaaatgggtgaccacctcgcccttgaagactacctgaccacagacttggtggagacatggctcagaaacatgaaaaccagaaacatggaagttttctttccgaagttcaagctagatcagaagtatgagatgcatgagctgcttaggcagatgggaatcagaagaatcttctcaccctttgctgaccttagtgaactctcagctactggaagaaatctccaagtatccagggttttacaaagaacagtgattgaagttgatgaaaggggcactgaggcagtggcaggaatcttgtcagaaattactgcttattccatgcctcctgtcatcaaagtggaccggccatttcatttcatgatctatgaagaaacctctggaatgcttctgtttctgggcagggtggtgaatccgactctccta

SEQ ID NO: 6127 - DNA, 636 bp, Homo Sapiens
gctcctatccatgatgctgacgcccaagagagctccttgggtctcacaggcctccagagcctactccaaggcttcagccgacttttcctgaaaggtaacctgcttcggggcatagacagcttattctctgcccccatggacttccggggcctccctgggaactaccacaaagaggagaaccaggagcaccagctggggaacaacaccctctccagccacctccagatcgacaagatgaccgacaacaagacaggagaggtgctgatctccgagaatgtggtggcatccattcaaccagcggaggggagcttcgagggtgatttgaaggtacccaggatggaggagaaggaggccctggtacccatccagaaggccacggacagcttccacacagaactccatccccgggtggccttctggatcattaagctgccacggcggaggtcccaccaggatgccctggagggcggccactggctcagcgagaagcgacaccgcctgcaggccatccgggatggactccgcaaggggacccacaaggacgtcctagaagaggggaccgagagctcctcccactccaggctgtccccccgaaagacccacttactgtacatcctcaggccctctcggcagctg

SEQ ID NO: 6128 - DNA, 309 bp, Homo Sapiens
gtcctggcccagctggatgcactgctggtcttcccaggccaagtggctcaactctcctgcacgctcagcccccagcacgtcaccatcagggactacggtgtgtcctggtaccagcagcgggcaggcagtgcccctcgatatctcctctactaccgctcggaggaggatcaccaccggcctgctgacatccccgatcgattctcggcagccaaggatgaggcccacaatgcctgtgtcctcaccattagtcccgtgcagcctgaagacgacgcggattactactgctctgttggctacggctttagtccc

SEQ ID NO: 6129 - DNA, 705 bp, Homo Sapiens
catggctgggcagacacccgtgccatcggggccgaggaatgtcgccccaactcccagccttggcaggccggcctcttccaccttactcggctcttctgtggggcgaccctcatcagtgaccgctggctgctcacagctgcccactgccgcaagccgtatctgtgggtccgccttggagagcaccacctctggaaatgggagggtccggagcagctgttccgggttacggacttcttcccccaccctggcttcaacaaggacctcagcgccaatgaccacaatgatgacatcatgctgatccgcctgcccaggcaggcacgtctgagtcctgctgtgcagcccctcaacctcagccagacctgtgtctccccaggcatgcagtgtctcatctcaggctggggggccgtgtccagccccaaggcgctgtttccagtcacactgcagtgtgccaacatcagcatcctggagaacaaactctgtcactgggcataccctggacacatctcggacagcatgctctgtgcgggcctgtgggaggggggccgaggttcctgccagggtgactctgggggccccctggtttgcaatggaaccttggcaggcgtggtgtctgggggtgctgagccctgctccagaccccggcgccccgcagtctacaccagcgtatgccactaccttgactggatccaagaaatcatggagaac

SEQ ID NO: 6130 - DNA, 783 bp, Homo Sapiens
ggaggtgtctcccaggagtcttccaaggttctcaacaccaatgggaccagtgggtttctcccaggtggctacacctgcttcccccactctcagccctggcaggctgccctactagtgcaagggcggctactctgtgggggagtcctggtccaccccaaatgggtcctcactgccgcacactgtctaaaggaggggctcaaagtttacctaggcaagcacgccctagggcgtgtggaagctggtgagcaggtgagggaagttgtccactctatcccccaccctgaataccggagaagccccacccacctgaaccacgaccatgacatcatgcttctggagctgcagtccccggtccagctcacaggctacatccaaaccctgcccctttcccacaacaaccgcctaacccctggcaccacctgtcgggtgtctggctggggcaccaccaccagcccccaggtgaattaccccaaaactctacaatgtgccaacatccaacttcgctcagatgaggagtgtcgtcaagtctacccaggaaagatcactgacaacatgttgtgtgccggcacaaaagagggtggcaaagactcctgtgagggtgactctgggggccccctggtctgtaacagaacactgtatggcatcgtctcctggggagacttcccatgtgggcaacctgaccggcctggtgtctacacccgtgtctcaagatacgtcctgtggatccgtgaaacaatccgaaaatatgaaacccagcagcaaaaatggttgaagggcccacaa

SEQ ID NO: 6131 - DNA, 2889 bp, Homo Sapiens
agcctgcgcttcgacgagtgcggggcgagtgccacgccaggcgccgacggtggcccctcaggctttccggagcgcggcggcaacgggagcctccctggatcggcccggcgcaaccaccacgcaggcggggactcctggcagcccgaggcgggtggggtggccagtccggggaccacgtcggcccagccgccgtcggaggaggagcgggagccgtgggagccgtggacgcagctgcgcctgtcgggccacctgaagccgctgcactacaatctgatgctcaccgccttcatggagaacttcaccttctccggggaggtcaacgtggagatcgcgtgccggaacgccacccgctacgtagtgctgcacgcttcccgagtggcggtggagaaagtgcagctggccgaggaccgggcgttcggggctgtccctgtagccggttttttcctctacccgcaaacccaggtcttagtggtggtgctgaataggacactggacgcgcagaggaattacaatctgaagattatctacaacgcgctcatcgagaatgagctcctgggcttcttccgcagctcctatgtgctccacggggagagaagattccttggtgttactcagttttcgcctacacatgccagaaaggcatttccttgttttgatgagccaatctacaaggctactttcaaaatcagcatcaagcatcaagcaacctatttatctttatctaatatgccagtggaaacttccgtgtttgaggaagatggatgggttacggatcacttttcacagacccctctcatgtccacatattatttagcctgggcaatttgcaacttcacatacagagaaactaccaccaagagtggggttgtagtacgattatatgcaagacctgatgctatcagaagaggatccggggactatgctctccatataacaaagagattaatagaattttatgaagactactttaaagtgccctattccttgccaaaactagatcttttagctgtgcctaagcatccgtatgctgctatggagaactggggactaagtatttttgtggaacaaagaatactgctggatcccagtgtttcatctatttcttatttgctggatgtcaccatggtcattgttcatgagatatgtcaccagtggtttggtgaccttgtgacgcctgtgtggtgggaagacgtgtggctgaaggaagggtttgctcactactttgaatttgttggtacagactacctctatcctggctggaacatggaaaagcagaggtttctgaccgatgttctgcatgaagtgatgctgctggacggtttggccagttcccatccagtatcacaggaagtgctgcaggcaacagatattgacagggtgtttgactggatcgcatataaaaagggtgctgctttaataagaatgctggctaattttatgggccattcagttttccagaggggtttgcaagattatttaaccattcataagtatggtaatgcagccagaaatgatctctggaatacattatcggaggctttaaaaagaaatgggaaatatgtaaatatacaagaagtaatggatcagtggacactccagatgggttatcctgttatcaccatcttgggaaacacaacagcagaaaatagaataataattacccaacagcattttatctatgatatcagtgctaaaactaaagcacttaaacttcagaataacagttacctgtggcagattccattaactattgtggtaggaaatagaagccatgtgtcttcagaagcaattatttgggtgtctaacaaatcagagcaccacagaataacttatttggacaaaggaagctggctgctggggaacatcaatcaaactggctattttagagtcaactatgacctaaggaactggagattattaattgatcaattaatccggaatcatgaggttctttctgtcagtaaccgagcgggcttgatcgatgatgccttcagcctagccagggctggctatttgcctcagaatattcctctggagattatcagatacctgtctgaggagaaggattttcttccttggcatgctgccagccgagctctttatcctctagataaattactggaccgcatggaaaactacaacattttcaatgaatatattttaaagcaagttgcaacaacatatatcaagcttgggtggccgaaaaataattttaatggatctcttgttcaagcatcctaccaacatgaagaactacgtagagaagttataatgctggcctgcagttttggcaacaagcactgtcaccaacaggcatcaacacttatttcagattggatttccagcaacaggaacagaataccactaaatgttagagacatcgtatactgtacaggagtgtcactactggatgaggatgtctgggaattcatatggatgaaattccattccaccacagcagtttctgagaagaaaatattattggaagccttaacttgcagtgatgacaggaatttattaaacaggcttctaaatctgtcactgaattctgaggtggtgctggatcaagatgcaattgatgtcataatccatgtagctcgaaatccacatggtcgagaccttgcctggaagtttttcagggataaatggaagatattaaataccaggtatggagaagcattgtttatgaattccaaactcatcagtggtgtcacagaatttcttaatactgaaggtgaactcaaagagctcaagaacttcatgaaaaactatgatggggtagctgctgcttctttctcacgagctgtggaaactgtcgaagccaatgtgcgctggaaaatgctttaccaagacgagcttttccaatggttaggaaaagctctaagacac

SEQ ID NO: 6132 - DNA, 381 bp, Homo Sapiens
acgaggggcatcaagcacagaatcaagtggaaccggaaggccctgcccagcactgcccagatcactgaggcccaggtggctgagaaccgcccgggagccttcatcaagcaaggccgcaagctcgacattgacttcggagccgagggcaacaggtactacgaggccaactactggcagttccccgatggcatccactacaacggctgctctgaggctaatgtgaccaaggaggcatttgtcaccggctgcatcaatgccacccaggcggcgaaccagggggagttccagaagccagacaacaagctccaccagcaggtgctctggcggctggtccaggagctctgctccctcaagcattgcgagttttggttggagaggggc

SEQ ID NO: 6133 - DNA, 1176 bp, Homo Sapiens
cagtccccagagagacctgttttcacatgtggtggcattcttactggagagtctggatttattggcagtgaaggttttcctggagtgtaccctccaaatagcaaatgtacttggaaaatcacagttcccgaaggaaaagtagtcgttctcaatttccgattcatagacctcgagagtgacaacctgtgccgctatgactttgtggatgtgtacaatggccatgccaatggccagcgcattggccgcttctgtggcactttccggcctggagcccttgtgtccagtggcaacaagatgatggtgcagatgatttctgatgccaacacagctggcaatggcttcatggccatgttctccgctgctgaaccaaacgaaagaggggatcagtattgtggaggactccttgacagaccttccggctcttttaaaacccccaactggccagaccgggattaccctgcaggagtcacttgtgtgtggcacattgtagccccaaagaatcagcttatagaattaaagtttgagaagtttgatgtggagcgagataactactgccgatatgattatgtggctgtgtttaatggcggggaagtcaacgatgctagaagaattggaaagtattgtggtgatagtccacctgcgccaattgtgtctgagagaaatgaacttcttattcagtttttatcagacttaagtttaactgcagatgggtttattggtcactacatattcaggccaaaaaaactgcctacaactacagaacagcctgtcaccaccacattccctgtaaccacgggtttaaaacccaccgtggccttgtgtcaacaaaagtgtagacggacggggactctggagggcaattattgttcaagtgactttgtattagccggcactgttatcacaaccatcactcgcgatgggagtttgcacgccacagtctcgatcatcaacatctacaaagagggaaatttggcgattcagcaggcgggcaagaacatgagtgccaggctgactgtcgtctgcaagcagtgccctctcctcagaagaggtctaaattacattattatgggccaagtaggtgaagatgggcgaggcaaaatcatgccaaacagctttatcatgatgttcaagaccaagaatcagaagctcctggatgccttaaaaaataagcaatgt

SEQ ID NO: 6134 - DNA, 2640 bp, Homo Sapiens
tacatcaccgacgagaacccagaagttatgattcccttcaccaatgccaactacgacagccatcccatgctgtacttctccagggcagaagtggcggagctgcagctcagggctgccagctcgcacgagcacattgcagcccgcctcacggaggctgtgcacacgatgctgtccagccccttggaatacctccctccctgggatcccaaggactacagtgcccgctggaatgaaatttttggaaacaacttgggtgccttggcaatgttctgtgtgctgtatcctgagaacattgaagcccgagacatggccaaagactacatggagaggatggcagcgcagcctagttggttggtgaaagatgctccttgggatgaggtcccgcttgctcactccctggttggttttgccactgcttatgacttcttgtacaactacctgagcaagacacaacaggagaagtttcttgaagtgattgccaatgcctcagggtatatgtatgaaacttcatacaggagaggatggggatttcaatacctgcacaatcatcagcccaccaactgtatggctttgctcacgggaagcctagtcctgatgaatcaaggatatcttcaagaagcctacttatggaccaaacaagttctgaccatcatggagaaatctctggtcttgctcagggaggtgacggatggctccctctatgaaggagttgcgtatggcagctacaccactagatcactcttccaatacatgtttctcgtccagaggcacttcaacatcaaccactttggccatccgtggcttaaacaacactttgcatttatgtatagaaccatcctgccagggtttcaaaggactgtggctattgcggactcaaattacaactggttttatggtccagaaagccaattagtgttccttgataaatttgtcatgcgtaatggcagtggtaactggctagctgaccaaatcagaaggaaccgtgtggtggaaggtccaggaacaccatccaaagggcagcgctggtgcactctgcacacagaatttctctggtatgatggcagcttgaaatcggttcctcctccagactttggcacccctacactgcattattttgaagactggggtgtcgtgacttatggaagtgcactacctgcagaaatcaatagatctttcctttccttcaagtctggaaaactggggggacgtgcaatatatgacattgtccacagaaacaaatacaaagattggatcaaaggatggagaaattttaatgcagggcatgaacatcctgatcaaaactcatttacttttgctcccaatggtgtgcctttcattactgaggctctgtacgggccaaagtacaccttcttcaacaatgttttgatgttttccccagctgtgtcaaagagctgcttttctccctgggtgggtcaggtcacagaagactgctcatcaaaatggtctaaatacaagcatgacctggcagctagttgtcaggggagggtggttgcagcagaggagaaaaatggggtggttttcatccgaggagaaggtgtgggagcttataacccccagctcaacctgaagaatgttcagaggaatctcatcctcctacatccacagctgcttctccttgtagaccaaatacacctgggagaggagagtcccttggagacagcagcgagcttcttccataatgtggatgttccttttgaggagactgtggtagatggtgtccatggggctttcatcaggcagagagatggtctctataaaatgtactggatggacgatactggctacagcgagaaagcaacctttgcctcagtgacatatcctcggggctatccctacaacgggacaaactatgtgaatgtcaccatgcacctccgaagtcccatcaccagggcagcttacctcttcatagggccatctatagatgttcagagcttcactgtccacggagactctcagcaactggatgtgttcatagccaccagcaaacatgcctacgccacatacctgtggacaggtgaggccacaggacagtctgcctttgcacaggtcattgctgatcgtcacaaaattctgtttgaccggaattcagccatcaagagcagcattgtccctgaggtgaaggactatgctgctattgtggaacagaacttgcagcattttaaaccagtgtttcagctgctggagaagcagatactgtcccgagtccggaacacagctagctttaggaagactgctgaacgcctgctgagattttcagataagagacagactgaggaggccattgacaggatttttgccatatcacagcaacagcagcagcaaagcaagtcaaagaaaaaccgaagggcaggcaaacgctataaatttgtggatgctgtccctgatatttttgcacagattgaagtcaatgagaaaaagattagacagaaagctcagattttggcacagaaagaactacccatagatgaagatgaagaaatgaaagaccttttagattttgcagatgtaacatacgagaaacataaaaatgggggcttgattaaaggccggtttggacaggcacggatggtgacaactacacacagcagggccccatcactgtctgcttcctataccagg

SEQ ID NO: 6135 - DNA, 1149 bp, Homo Sapiens
cattatgtgagatataatcaaaagaagacctacaattactatagcacattgtcatttacaactgacaaactatatgctgagtttggcagagaggcttctaacaattttacagaaatgagccagagacttgaatcaatggtgaaaaatgcattttataaatctccattaagggaagaatttgtcaagtctcaggttatcaagttcagtcaacagaagcatggagtgttggctcatatgctgttgatttgtagatttcactctactgaggatcctgaaactgtagataaaattgttcaacttgttttacatgaaaagctgcaagatgctgtaggaccccctaaagtagatcctcactcagttaaaattaaaaaaatcaacaagacagaaacagacagctatctaaaccattgctgcggaacacgaagaagtaaaactctaggtcagagtctcaggatcgttggtgggacagaagtagaagagggtgaatggccctggcaggctagcctgcagtgggatgggagtcatcgctgtggagcaaccttaattaatgccacatggcttgtgagtgctgctcactgttttacaacatataagaaccctgccagatggactgcttcctttggagtaacaataaaaccttcgaaaatgaaacggggtctccggagaataattgtccatgaaaaatacaaacacccatcacatgactatgatatttctcttgcagagctttctagccctgttccctacacaaatgcagtacatagagtttgtctccctgatgcatcctatgagtttcaaccaggtgatgtgatgtttgtgacaggatttggagcactgaaaaatgatggttacagtcaaaatcatcttcgacaagcacaggtgactctcatagacgctacaacttgcaatgaacctcaagcttacaatgacgccataactcctagaatgttatgtgctggctccttagaaggaaaaacagatgcatgccagggtgactctggaggaccactggttagttcagatgctagagatatctggtaccttgctggaatagtgagctggggagatgaatgtgcgaaacccaacaagcctggtgtttatactagagttacggccttgcgggactggattacttcaaaaactggtatc

SEQ ID NO: 6136 - DNA, 210 bp, Homo Sapiens
ggactgaaccagctttacttctattatgaaaccagagctatcgatgagcctaacaactgcaaggggatccgatgtgagaaacagaacaatgccttctccacgctctttgagactcttcagtcactcttctggtctgtatttggccttttaaatctatatgtcaccaatgtgaaagccagacacgaattcaccgagtttgtaggagctacc

SEQ ID NO: 6137 - DNA, 558 bp, Homo Sapiens
ttcggggacgaggaagagcggcgctgcgaccccatccgcatctccatgtgccagaacctcggctacaacgtgaccaagatgcccaacctggttgggcacgagctgcagacggacgccgagctgcagctgacaactttcacaccgctcatccagtacggctgctccagccagctgcagttcttcctttgttctgtttatgtgccaatgtgcacagagaagatcaacatccccattggcccatgcggcggcatgtgtctttcagtcaagagacgctgtgaacccgtcctgaaggaatttggatttgcctggccagagagtctgaactgcagcaaattcccaccacagaacgaccacaaccacatgtgcatggaagggccaggtgatgaagaggtgcccttacctcacaaaacccccatccagcctggggaagagtgtcactctgtgggaaccaattctgatcagtacatctgggtgaaaaggagcctgaactgtgtgctcaagtgtggctatgatgctggcttatacagccgctcagccaaggagttcactgatatctgg

SEQ ID NO: 6138 - DNA, 615 bp, Homo Sapiens
atcagctccatggacatggagcgcccgggcgacggcaaatgccagcccatcgagatcccgatgtgcaaggacatcggctacaacatgactcgtatgcccaacctgatgggccacgagaaccagcgcgaggcagccatccagttgcacgagttcgcgccgctggtggagtacggctgccacggccacctccgcttcttcctgtgctcgctgtacgcgccgatgtgcaccgagcaggtctctacccccatccccgcctgccgggtcatgtgcgagcaggcccggctcaagtgctccccgattatggagcagttcaacttcaagtggcccgactccctggactgccggaaactccccaacaagaacgaccccaactacctgtgcatggaggcgcccaacaacggctcggacgagcccacccggggctcgggcctgttcccgccgctgttccggccgcagcggccccacagcgcgcaggagcacccgctgaaggacgggggccccgggcgcggcggctgcgacaacccgggcaagttccaccacgtggagaagagcgcgtcgtgcgcgccgctctgcacgcccggcgtggacgtgtactggagccgcgaggacaagcgc

SEQ ID NO: 6139 - DNA, 825 bp, Homo Sapiens
gcagatgggggtcaacactggacgtatgagggcccacatggtcaggaccattggccagcctcttaccctgagtgtggaaacaatgcccagtcgcccatcgatattcagacagacagtgtgacatttgaccctgatttgcctgctctgcagccccacggatatgaccagcctggcaccgagcctttggacctgcacaacaatggccacacagtgcaactctctctgccctctaccctgtatctgggtggacttccccgaaaatatgtagctgcccagctccacctgcactggggtcagaaaggatccccaggggggtcagaacaccagatcaacagtgaagccacatttgcagagctccacattgtacattatgactctgattcctatgacagcttgagtgaggctgctgagaggcctcagggcctggctgtcctgggcatcctaattgaggtgggtgagactaagaatatagcttatgaacacattctgagtcacttgcatgaagtcaggcataaagatcagaagacctcagtgcctcccttcaacctaagagagctgctccccaaacagctggggcagtacttccgctacaatggctcgctcacaactcccccttgctaccagagtgtgctctggacagttttttatagaaggtcccagatttcaatggaacagctggaaaagcttcaggggacattgttctccacagaagaggagccctctaagcttctggtacagaactaccgagcccttcagcctctcaatcagcgcatggtctttgcttctttcatccaagcaggatcctcgtataccacaggtgaaatg

SEQ ID NO: 6140 - DNA, 561 bp, Homo Sapiens
gccccgcgcccgtgccaggcgccgcagcagtgggaggggcgccaggttatgtaccagcaaagtagcgggcgcaacagccgcgccctgctctcctacgacgggctcaaccagcgcgtgcgggtgctggacgagaggaaggcgctgatcccctgcaagagattatttgaatatattttgctgtataaggatggagtgatgtttcagattgaccaagccaccaagcagtgctcaaagatgaccctgacacagccctgggatcctcttgacattcctcaaaactccacctttgaagaccagtactccattggggggcctcaggagcagatcaccgtccaggagtggtcggacagaaagtcagctagatcctatgaaacctggattggcatctatacagtcaaggattgctatcctgtccaggaaacctttaccataaactacagtgtgatattgtctacgcggttttttgacatccagctgggtattaaagacccctcggtgtttacccctccaagcacgtgccagatggcccaactggagaagatgagcgaagactgctcctgg

SEQ ID NO: 6141 - DNA, 825 bp, Homo Sapiens
gcccccgcgccccaccgcgcgtcctacaagccggtcatcgtggtgcatgggctcttcgacagctcgtacagcttccgccacctgctggaatacatcaatgagacacaccccgggactgtggtgacagtgctcgatctcttcgatgggagagagagcttgcgacccctgtgggaacaggtgcaagggttccgagaggctgtggtccccatcatggcaaaggcccctcaaggggtgcatctcatctgctactcgcaggggggccttgtgtgccgggctctgctttctgtcatggatgatcacaacgtggattctttcatctccctctcctctccacagatgggacagtatggagacacggactacttgaagtggctgttccccacctccatgcggtctaacctctatcggatctgctatagcccctggggccaggaattctccatctgcaactactggcatgatccccaccacgatgacttgtacctcaatgccagcagcttcctggccctgatcaatggggaaagagaccatcccaatgccacagtatggcggaagaactttctgcgtgtgggccacctggtgctgattgggggccctgatgatggtgttattactccctggcagtccagcttctttggtttctatgatgcaaatgagaccgtcctggagatggaggagcaactggtttatctgcgggattcttttgggttgaagactctattggcccggggggccatagtgaggtgtccaatggccggtatctcccacacagcctggcactccaaccgtaccctttatgagacctgcattgaaccttggctctcc

SEQ ID NO: 6142 - DNA, 423 bp, Homo Sapiens
gggcagacaccgcgccctgccgagcgggggcccccagtgcggcttttcaccgaggaggagctggcccgctatggcggggaggaggaagatcagcccatctacttggcagtgaagggagtggtgtttgatgtcacctccggaaaggagttttatggacgaggagccccctacaatgccttgacggggaaggactccactagaggggtagccaagatgtccttggatcctgcagacctcacccatgacactacgggtctcacggccaaggaactggaggccctggatgaggtcttcaccaaagtgtacaaagccaaataccccatcgtcggctacactgcccggagaattctcaatgaggatggcagccctaacctggacttcaagcctgaagaccagccccattttgacatcaaggatgagttc

SEQ ID NO: 6143 - DNA, 312 bp, Homo Sapiens
tattacaatgtcataattgcctatagtctttactacatgtttgcttcttttcaaagtgaactaccatggaaaaattgttcttcgtggtcagataaaaactgtagcagatcaccaatagtaactcactgtaatgtgagtacagtgaataaaggaatacaagagatcatccaaatgaataaaagctgggtagacatcaacaattttacctgcatcaacggcagtgaaatttatcagccagggcagcttcccagtgaacaatattggaataaagtggcgctccaacggtcaagtggaatgaatgagactggagta

SEQ ID NO: 6144 - DNA, 741 bp, Homo Sapiens
gagggcaactaccccagtcccatcccgaaattccacttcgagttctcctctgctgtgcccgaagtcgtcctgaacctcttcaactgcaaaaattgtgcaaatgaagctgtggttcaaaagattttggacagggtgctgtcaagatacgatgtccgcctgagaccgaattttggaggtgcccctgtgcctgtgagaatatctatttatgtcacgagcattgaacagatctcagaaatgaatatggactacacgatcacgatgttttttcatcagacttggaaagattcacgcttagcatactatgagaccaccctgaacttgaccctggactatcggatgcatgagaagttgtgggtccctgactgctactttctgaacagcaaggatgctttcgtgcatgatgtgactgtggagaatcgcgtgtttcagcttcacccagatggaacggtgcggtacggcatccgactcaccactacagcagcttgttccctggatctgcataaattccctatggacaagcaggcctgcaacctggtggtagagagctatggttacacggttgaagacatcatattattctgggatgacaatgggaacgccatccacatgactgaggagctgcatatccctcagttcactttcctgggaaggacgattactagcaaggaggtgtatttctacacaggttcctacatacgcctgatactgaagttccaggttcagagggaagttaacagctac

SEQ ID NO: 6145 - DNA, 720 bp, Homo Sapiens
gtagtcggagggactgaggccgggaggaattcctggccctctcagatttccctccagtaccggtctggaggttcccggtatcacacctgtggagggacccttatcagacagaactgggtgatgacagctgctcactgcgtggattaccagaagactttccgcgtggtggctggagaccataacctgagccagaatgatggcactgagcagtacgtgagtgtgcagaagatcgtggtgcatccatactggaacagcgataacgtggctgccggctatgacatcgccctgctgcgcctggcccagagcgttaccctcaatagctatgtccagctgggtgttctgccccaggagggagccatcctggctaacaacagtccctgctacatcacaggctggggcaagaccaagaccaatgggcagctggcccagaccctgcagcaggcttacctgccctctgtggactacgccatctgctccagctcctcctactggggctccactgtgaagaacaccatggtgtgtgctggtggagatggagttcgctctggatgccagggtgactctgggggccccctccattgcttggtgaatggcaagtattctgtccatggagtgaccagctttgtgtccagccggggctgtaatgtctccaggaagcctacagtcttcacccaggtctctgcttacatctcctggataaataatgtcatcgcctccaac

SEQ ID NO: 6146 - DNA, 375 bp, Homo Sapiens
gggatcctgaacctgaacaagatggtcaagcaagtgactgggaaaatgcccatcctctcctactggccctacggctgtcactgcggactaggtggcagaggccaacccaaagatgccacggactggtgctgccagacccatgactgctgctatgaccacctgaagacccaggggtgcagcatctacaaggactattacagatacaacttttcccaggggaacatccactgctctgacaagggaagctggtgtgagcagcagctgtgtgcctgtgacaaggaggtggccttctgcctgaagcgcaacctggacacctaccagaagcgactgcgtttctactggcggccccactgccgggggcagacccctgggtgc

SEQ ID NO: 6147 - DNA, 222 bp, Homo Sapiens
aatctcacaaccattgcatcttggctgtcatggcttcagtacttcagcattccacgatatggatttacggctttgcagcataatgaatttttgggacaaaacttctgcccaggactcaatgcaacaggaaacaatccttgtaactatgcaacatgtactggcgaagaatatttggtaaagcagggcatcgatctctcaccctggggcttgtggaagaatcac

SEQ ID NO: 6148 - DNA, 1371 bp, Homo Sapiens
tctcttctagagccgagggacccggtggcctcgtcgctcagcccctatttcggcaccaagactcgctacgaggatgtcaaccccgtgctattgtcgggccccgaggctccgtggcgggaccctgagctgctggaggggacctgcaccccggtgcagctggtcgccctcattcgccacggcacccgctaccccacggtcaaacagatccgcaagctgaggcagctgcacgggttgctgcaggcccgcgggtccagggatggcggggctagtagtaccggcagccgcgacctgggtgcagcgctggccgactggcctttgtggtacgcggactggatggacgggcagctagtagagaagggacggcaggatatgcgacagctggcgctgcgtctggcctcgctcttcccggcccttttcagccgtgagaactacggccgcctgcggctcatcaccagttccaagcaccgctgcatggatagcagcgccgccttcctgcaggggctgtggcagcactaccaccctggcttgccgccgccggacgtcgcagatatggagtttggacctccaacagttaatgataaactaatgagattttttgatcactgtgagaagtttttaactgaagtagaaaaaaatgctacagctctttatcacgtggaagccttcaaaactggaccagaaatgcagaacattttaaaaaaagttgcagctactttgcaagtgccagtaaatgatttaaatgcagatttaattcaagtagcctttttcacctgttcatttgacctggcaattaaaggtgttaaatctccttggtgtgatgtttttgacatagatgatgcaaaggtattagaatatttaaatgatctgaaacaatattggaaaagaggatatgggtatactattaacagtcgatccagctgcaccttgtttcaggatatctttcagcacttggacaaagcagttgaacagaaacaaaggtctcagccaatttcttctccagtcatcctccagtttggtcatgcagagactcttcttccactgctttctctcatgggctacttcaaagacaaggaacccctaacagcgtacaattacaaaaaacaaatgcatcggaagttccgaagtggtctcattgtaccttatgcctcgaacctgatatttgtgctttaccactgtgaaaatgctaagactcctaaagaacaattccgagtgcagatgttattaaatgaaaaggtgttacctttggcttactcacaagaaactgtttcattttatgaagatctgaagaaccactacaaggacatccttcagagttgtcaaaccagtgaagaatgtgaattagcaagggctaacagtacatctgatgaacta

SEQ ID NO: 6149 - DNA, 1269 bp, Homo Sapiens
gcaccccctccatgccgctgtatgaccagtagctccccttaccaagagtttctatggagaatgcagcgtcccggaaatattgatgccccatcgtataggagtctttctaagggaacccccaccttcactgcccacacccatatgccccgcaactgctatcactctgccactctttgcatgcatgcaaatactcattattggacaggaaaaatgattaatcctagttgtcctggaggacttggagtcactgtctgttggacttacttcacccaaactggtatgtctgatgggggtggagttcaagatcaggcaagagaaaaacatgtaaaagaagtaatctcccaactcacccgggtacatggcacctctagcccctacaaaggactagatctctcaaaactacatgaaaccctccgtacccatactcgcctggtaagcctatttaataccaccctcactgggctccatgaggtctcggcccaaaaccctactaactgttggatatgcctccccctgaacttcaggccatatgtttcaatccctgtacctgaacaatggaacaacttcagcacagaaataaacaccacttccgttttagtaggacctcttgtttccaatctggaaataacccatacctcaaacctcacctgtgtaaaatttagcaatactacatacacaaccaactcccaatgcatcaggtgggtaactcctcccacacaaatagtctgcctaccctcaggaatattttttgtctgtggtacctcagcctatcgttgtttgaatggctcttcagaatctatgtgcttcctctcattcttagtgccccctatgaccatctacactgaacaagatttatacagttatgtcatatctaagccccgcaacaaaagagtacccattcttccttttgttataggagcaggagtgctaggtgcactaggtactggcattggcggtatcacaacctctactcagttctactacaaactatctcaagaactaaatggggacatggaacgggtcgccgactccctggtcaccttgcaagatcaacttaactccctagcagcagtagtccttcaaaatcgaagagctttagacttgctaaccgctgaaagagggggaacctgtttatttttaggggaagaatgctgttattatgttaatcaatccggaatcgtcactgagaaagttaaagaaattcgagatcgaatacaacgtagagcagaggagcttcgaaacactggaccctggggcctcctcagccaa

SEQ ID NO: 6150 - DNA, 2136 bp, Homo Sapiens
cccaaaaaagccaactcactggccccccaggacctggacctggagatcctggagaccgtcatggggcagctggatgcccacaggatccgggagaacctcagagaactctccagggagccacacctggcctccagccctcgggatgaggacctggtgcagctgctgctgcagcgctggaaggacccagagtcaggcctggactcggccgaggcctccacgtacgaagtgctgctgtccttccctagccaggagcagcccaacgtcgtggacatcgtgggccccactgggggcatcatccactcctgccaccggactgaggagaacgtgaccggggagcaaggggggccagatgtggtacaaccctatgctgcctatgctccttctggaaccccacagggcctcctcgtctatgccaaccggggcgcggaagaagactttaaggagctacagactcagggcatcaaacttgaaggcaccattgccctgactcgatatgggggtgtagggcgtggggccaaggctgtgaacgctgccaagcacggggtagctggggtgctggtgtacacagaccctgccgacatcaacgatgggctgagctcacccgacgaaacctttcccaactcctggtacctgcccccctcaggagtggagcgaggctcctactacgagtattttggggaccctctgactccctaccttccagccgtcccctcttccttccgcgtggaccttgccaatgtctccggatttcccccaattcctacacagcccattggcttccaggatgcaagagacctgctctgtaacctcaacggaactttggccccagccacctggcagggagcactgggctgccactacaggttgggtcccggcttccggcctgacggagacttcccagcagacagccaggtgaatgtgagcgtctacaaccgcctggagctgaggaactcttccaacgtcctgggcatcatccgtggggctgtggagcctgatcgctacgtgctgtatgggaaccaccgagacagctgggtgcacggggctgtggaccccagcagtggcaccgccgtcctcctggagctctcccgtgtcctggggaccctgctgaagaagggcacctggcgtcctcgcagatcaatcgtgtttgcgagctggggggctgaggagtttgggctcattggctccacggaattcacagaagagttcttcaacaagctgcaggagcgcacggtggcctacatcaacgtggacatctcggtgtttgccaacgctacccttagggtgcaggggacgccccctgtccagagcgtcgtcttctctgcaaccaaagagatccgctcaccaggccctggcgacctgagcatctacgacaactggatccggtacttcaaccgcagcagcccggtgtacggcctggtccccagcttgggttctctgggtgctggcagcgactatgcacccttcgttcacttcctgggcatctcctccatggacattgcctatacctatgaccggagcaagacttcagccaggatctaccccacctaccacacagcctttgacacctttgactatgtggacaagtttttggacccgggcttcagcagccatcaggctgtggcccggacagcggggagtgtgattctccggctcagtgacagcttcttcctgcccctcaaagtcagtgactacagtgagacactccgcagcttcctgcaggcagcccagcaagatcttggggccctgctggagcagcacagcatcagcctggggcctctggtgactgcagtggagaagtttgaggcagaagctgcagccttgggccaacgcatatcaacactgcagaagggcagccctgaccccctgcaggtccggatgctcaatgaccagttgatgctcttggaacggacctttctgaaccctagagccttcccagaggaacgctactacagccatgtgctctgggcacctcgcacgggctccgtagtcacattcccgggcctatccaatgcctgctccagggccagggacacagcttctggatctgaagcttgggctgaggtccagagacagctcagcattgtggtgacagccctggagggtgcggcagccaccctgaggcctgtggctgacctc

SEQ ID NO: 6151 - DNA, 1299 bp, Homo Sapiens
cagccgactttcatcaacagcgttcttccaatctcagcagcccttcccagcctggatcagaagaagcgtggtggccataaagcatgctgcctgctgacgcctcctccaccaccactgttcccaccaccattcttcagaggtggccgaagtccgcttctctccccagacatgaagaatctcatgctggaactggagacctcgcagtccccgtgcatgcaaggctcgctaggctcccctgggcctcccggcccccagggtccaccggggcttcctggcaagacaggaccaaagggagaaaagggggagcttggccgaccaggaaggaagggtagacctggccccccaggtgttcctggcatgcctgggcccatcggttggccaggccctgaaggacccaggggtgaaaaaggtgacctgggtatgatgggcttgccagggtcaagaggaccaatgggctccaagggctaccctggatccagaggggaaaagggatccagaggtgaaaagggtgacctgggtcccaaaggagaaaagggtttcccaggatttcctggaatgttggggcagaaaggtgaaatgggtccaaaaggtgaacctgggatagcaggacaccgaggacccacaggaagaccaggaaaacgaggcaagcagggacagaaaggggatagtggagttatgggcccaccaggcaagcctgggccttctggtcaacctggccgtccggggcccccaggccccccacctgcaggacaacttataatgggacccaaaggggaaagaggatttcccgggcctccaggaagatgtctttgtggacccactatgaatgtgaataacccttcctacggggaatctgtgtatgggcccagttccccgcgagttcctgtgatttttgtggtcaacaaccaggaggagcttgagaggctgaacacccaaaacgccattgccttccgcagagaccagagatctctgtacttcaaggacagccttggctggctccccatccagctgacccctttctaccctgtggattacactgcagaccagcacggcacctgtggggatgggctcctgcagcctggggaggagtgtgacgacggtaacagcgatgtgggtgacgactgcatccgctgtcaccgtgcctactgtggagatggtcaccggcatgagggtgtggaggactgtgacggctctgactttggctacctgacatgcgagacctatctccctgggtcatatggagacctgcaatgcacccagtactgctacatcgactccacgccctgccgctacttcacc

SEQ ID NO: 6152 - DNA, 1524 bp, Homo Sapiens
caggacgtcgtggacctggacttcttcacccaggagccgctgcacctggtgagcccctcgttcctgtccgtcaccattgacgccaacctggccacggacccgcggttcctcatcctcctgggttctccaaagcttcgtaccttggccagaggcttgtctcctgcgtacctgaggtttggtggcaccaagacagacttcctaattttcgatcccaagaaggaatcaacctttgaagagagaagttactggcaatctcaagtcaaccaggatatttgcaaatatggatccatccctcctgatgtggaggagaagttacggttggaatggccctaccaggagcaattgctactccgagaacactaccagaaaaagttcaagaacagcacctactcaagaagctctgtagatgtgctatacacttttgcaaactgctcaggactggacttgatctttggcctaaatgcgttattaagaacagcagatttgcagtggaacagttctaatgctcagttgctcctggactactgctcttccaaggggtataacatttcttgggaactaggcaatgaacctaacagtttccttaagaaggctgatattttcatcaatgggtcgcagttaggagaagattttattcaattgcataaacttctaagaaagtccaccttcaaaaatgcaaaactctatggtcctgatgttggtcagcctcgaagaaagacggctaagatgctgaagagcttcctgaaggctggtggagaagtgattgattcagttacatggcatcactactatttgaatggacggactgctaccagggaagattttctaaaccctgatgtattggacatttttatttcatctgtgcaaaaagttttccaggtggttgagagcaccaggcctggcaagaaggtctggttaggagaaacaagctctgcatatggaggcggagcgcccttgctatccgacacctttgcagctggctttatgtggctggataaattgggcctgtcagcccgaatgggaatagaagtggtgatgaggcaagtattctttggagcaggaaactaccatttagtggatgaaaacttcgatcctttacctgattattggctatctcttctgttcaagaaattggtgggcaccaaggtgttaatggcaagcgtgcaaggttcaaagagaaggaagcttcgagtataccttcattgcacaaacactgacaatccaaggtataaagaaggagatttaactctgtatgccataaacctccataatgtcaccaagtacttgcggttaccctatcctttttctaacaagcaagtggataaataccttctaagacctttgggacctcatggattactttccaaatctgtccaactcaatggtctaactctaaagatggtggatgatcaaaccttgccacctttaatggaaaaacctctccggccaggaagttcactgggcttgccagctttctcatatagtttttttgtgataagaaatgccaaagttgctgcttgcatc

SEQ ID NO: 6153 - DNA, 279 bp, Homo Sapiens
acagcccagaagccctattgcaataccagctggatcctggcagtgggcccccacctgtccaaagctgagcagctgaatctgaccataccccaagcacccaatggcagtttcctgacatgcttcatgtaccttcctgtgccttggaatctggattctatcatccagtttggcctcaatgacacagacacatgccaagatgggtggatctatcctgacgctaagaagcgatcgctgatcaatgagtttgacttggtatgtggcatggagacgaagaaggac

SEQ ID NO: 6154 - DNA, 486 bp, Homo Sapiens
cggaggagccaggatctccactgtggagcatgcagggctctggtggatgaactagaatgggaaattgcccaggtggaccccaagaagaccattcagatgggatctttccggatcaatccagatggcagccagtcagtggtggaggtgccttatgcccgctcagaggcccacctcacagagctgctggaggagatatgtgaccggatgaaggagtatggggaacagattgatccttccacccatcgcaagaactacgtacgtgtagtgggccggaatggagaatccagtgaactggacctacaaggcatccgaatcgactcagatattagcggcaccctcaagtttgcgtgtgagagcattgtggaggaatacgaggatgaactcattgaattcttttcccgagaggctgacaatgttaaagacaaactttgcagtaagcgaacagatctttgtgaccatgccctgcacatatcgcatgatgagcta

SEQ ID NO: 6155 - DNA, 1239 bp, Homo Sapiens
cgccgccgccaggcgccggccgggtccccgcggggcctcaggaagggggcggcccccgcgcgggagagacgcggccgagaacagtccactttggaaagtgaagaatggaatccttgggaaggagatgaaaaaaatgagcaacaacacagatttaaaactagccttcaaatattagataaatccacgaaaggaaaaacagatctcagtgtacaaatctggggcaaagctgccattggcttgtatctctgggagcatatttttgaaggcttacttgatcccagcgatgtgactgctcaatggagagaaggaaagtcaatcgtaggaagaacacagtacagcttcatcactggtccagctgtaataccagggtacttctccgttgatgtgaataatgtggtactcattttaaatggaagagaaaaagcaaagatcttttatgccacccagtggttactttatgcacaaaatttagtgcaaattcaaaaactccagcatcttgctgttgttttgctcggaaatgaacattgtgataatgagtggataaacccattcctcaaaagaaatggaggcttcgtggagctgcttttcataatatatgacagcccctggattaatgacgtggatgtttttcagtggcctttaggagtagcaacatacaggaattttcctgtggtggaggcaagttggtcaatgctgcatgatgagaggccatatttatgtaatttcttaggaacgatttatgaaaattcatccagacaggcactaatgaacattttgaaaaaagatgggaacgataagctttgttgggtttcagcaagagaacactggcagcctcaggaaacaaatgaaagtcttaagaattaccaagatgccttgcttcagagtgatctcacattgtgcccggtcggagtaaacacagaatgctatcgaatctatgaggcttgctcctatggctccattcctgtggtggaagacgtgatgacagctggcaactgtgggaatacatctgtgcaccacggtgctcctctgcagttactcaagtccatgggtgctccctttatctttatcaagaactggaaggaactccctgctgttttagaaaaagagaaaactataattttacaagaaaaaattgaaagaagaaaaatgttacttcagtggtatcagcacttcaagacagagcttaaaatgaaatttactaatattttagaaagctcatttttaatgaataataaaagt

SEQ ID NO: 6156 - DNA, 2958 bp, Homo Sapiens
gccggccccatccgggccttcgtggtgccccacagccacatggacgtgggctgggtctacactgtgcaggaaagcatgcgggcgtacgccgccaatgtctacacctcagtggtggaagagctggcccgcggccagcagcgccggttcatcgctgtggagcaggagtttttccggctgtggtgggatggcgtcgcctcggaccagcagaaataccaggtccgccagctcctggaggaaggacgcctggaatttgtcatcggaggccaggtcatgcatgacgaggctgtgacgcaccttgatgaccagatcctgcagctcacagaaggacacgggtttctctatgaaacatttgggatccggccacagttctcctggcacgttgacccgtttggcgcctctgccacgacgcccaccctatttgcgctggcgggcttcaatgcccacctcggctcccggatcgactacgacctgaaggcagccatgcaggaggcccgggggctgcagttcgtgtggcgagggtccccatccctctcagagcggcaggaaatcttcacgcacatcatggaccagtacagctactgcaccccgtcccacatccctttctccaacaggtcaggattttactggaatggcgtggctgtcttccccaagcctcccccagatggggtgtaccccaacatgagtgagcctgtcaccccagccaacatcaacctctatgccgaggccctggtggccaacgtgaagcagagggccgcctggttccggacaccgcacgtcctctggccctggggatgtgacaagcagttcttcaatgcctcggtgcagtttgccaacatggacccgctgctggaccacatcaacagccatgctgccgagctcggtgtctcggtgcagtatgccacgctgggcgactacttccgtgccctgcacgctctcaatgtcacctggcgtgtccgcgaccaccacgacttcctgccctattccacagaaccattccaggcctggacgggcttctacacgtcccgcagctcactgaaggggctggcccggcgagccagcgccttgttgtatgccggggagtccatgttcacacgctacctgtggccggccccccgtgggcatctggaccccacctgggccctgcagcagctccagcagcttcgctgggccgtctccgaggtccagcaccatgatgccatcactgggactgagtcccccaaggtgagagacatgtacgcaacgcacctggcctcggggatgctgggcgtgcgcaagctgatggcctccatcgtcctagatgagctccagccccaggcacccatggcggccagctccgatgcaggacctgcaggacattttgcctcggtctacaacccgctggcctggacggtcaccaccatcgtcaccctgactgttggtttccctggagtccgcgtcacagatgaggcgggccacccagtgccctcgcagatccagaactcaacagagaccccatctgcgtatgacctgcttattctgaccacaatcccaggcctcagttaccggcactacagcatcagacccactgcaggggcccaagagggcacccaggagccggctgccactgtggcgagcacccttcaatttggccgcaggctgaggagacgcaccagccatgcgggcaggtacttggtgcctgtggcaaacgactgctacattgtgctgctcgaccaggataccaacctgatgcacagcatctgggagagacagagtaaccgaacggtgcgcgtgacccaggaattcctggagtaccacgtcaacggggatgtgaaacagggccccatttccgataactacctgttcacaccgggcaaggccgcggtgcctgcgtgggaagctgtggaaatggagattgtggcgggacagcttgtgactgagatccggcagtacttctacaggaacatgacagcacagaattacacgtatgcaatccgctcccggctcacccatgtgccgcagggccatgacggggagctgctctgccaccggatagagcaggagtaccaagccggccccctggagctgaaccgtgaggctgtcctgaggaccagcaccaacctaaacagccagcaggtcatctactcagacaacaacggctaccagatgcagcggaggccctacgtttcctatgtgaacaacagcatcgcccggaattactaccccatggttcagtcggccttcatggaggatggcaaaagcaggcttgtgttgctgtcggagcgggcacatggcatctccagccaagggaatgggcaggtggaggtcatgctccaccggcggctgtggaacaacttcgactgggacctgggctacaacctcacgctgaacgacacctcagtcgtccacccagtgctctggcttctgctgggatcctggtccctcaccactgccctgcgccagaggagcgcactggcgctgcagcacaggcccgtggtgctgttcggagacctcgctgggactgcgccgaagctcccaggaccccagcagcaagaggccgtgacgctgcccccgaatcttcacctgcagatcctgagcatccctggctggcgctacagctccaaccacacggagcactctcagaatctccggaaaggccatcgaggggaagcccaggctgacctccgccgtgtcctgctgcggctctaccacctgtatgaagtgggcgaggacccagtcctgtctcagccagtaacagtgaatctggaggctgtgctgcaggcgctggggtccgtggtggcagtggaggagcgctcgctcacagggacctgggatttgagcatgctgcaccgctggagctggaggacggggcctggccgccacagaggtgacaccacctctccctcgaggccaccaggaggccccatcatcaccgtccacccaaaggaaatccggacgttctttattcactttcaacagcag

SEQ ID NO: 6157 - DNA, 1224 bp, Homo Sapiens
tccggccaggagttctggcccggacaatcggcggccgatattctgtcgggggcggcttcccgcagacggtatcttctgtatgacgtcaaccccccggaaggcttcaacctgcgcagggatgtctatatccgaatcgcctctctcctgaagactctgctgaagacggaggagtgggtgcttgtcctgcctccatggggccgcctctatcactggcagagtcctgacatccaccaggtccggattccctggtctgagttttttgatcttccaagtctcaataaaaacatccccgtcatcgagtatgagcagttcatcgcagaatctggtgggccctttattgaccaggtttacgtcctgcaaagttacgcagaggggtggaaagaagggacctgggaagagaaggtggacgagcggccgtgtattgatcagctcctgtactcccaggacaagcacgagtactacagaggatggttttggggttatgaggagaccaggggtctaaacgtctcctgtctgtccgtccagggctcagcctccatcgtggcgcccctgctgctgagaaacacatcagcccggtccgtgatgttagacagagccgagaacctacttcacgaccactatggagggaaagaatactgggatacccgtcgcagcatggtgtttgccaggcacctgcgggaggtgggagacgagttcaggagcagacatctcaactccacggacgacgcagacaggatccccttccaggaggactggatgaagatgaaggtcaagctgggctccgcgctagggggcccctacctgggagtccacctgagaagaaaagatttcatctggggtcacagacaggatgtacccagtctggaaggggccgtgaggaagatccgcagcctcatgaagacccaccggctggacaaggtgtttgtggccacagatgccgtcagaaaggaatatgaagagctaaaaaagctgttacccgagatggtgaggtttgaacccacgtgggaggagctggagctctacaaggacggaggcgttgcgattattgaccagtggatctgcgcacacgccaggttttttattggcacctcagtctcaacattttcttttcggattcatgaggaaagagaaatcctggggttggaccccaagacgacgtacaacaggttctgcggagaccaagagaaggcgtgtgagcaacccacccactggaagatcacctac

SEQ ID NO: 6158 - DNA, 678 bp, Homo Sapiens
caggctttcagcgactctaatgatgagcgagagtcaagccctccagaaaaagaggaagcccaagagaagactgggaaaactgagccaagcttcaccaaagaaaacagcagcaagattcctaaaaaaggctttgtggaggtaactgaactcacagatgtaacatacaccagtaacttggtacgtctgaggccaggccacatgaatgtggtcctcatcctgtcgaattctaccaagaccagcctactacagaaatttgctttggaggtctacacatttactgggagcagctgcctacacttctccttcctgagtctagataaacacagagaatggctagaatacttactagaatttgctcaagatgcagctccaatcccaaaccaatatgataagcatttcatggagcgtgactacactggttatgtactggctctgaatggccacaagaaatacttctgcctcttcaagccccaaaagacagtcgaagaggaggaagccatagggtcgtgcagtgatgttgactcttccctctacctgggtgaatctcgagggaaaccttcctgtggccttggatccaggcccatcaaaggaaagttgagcaagctctctttatggatggaacgcctgctggagggctccttacagaggttttatatcccatcatggcctgaactagac

SEQ ID NO: 6159 - DNA, 162 bp, Homo Sapiens
ctgcccacccaacgcgaagacggtaacccgtgtgactttgactggagagaagtggagatcctgatgtttctcagtgccattgtgatgatgaagaaccgcagatccatcactgtggagcaacatataggcaacattttcatgtttagtaaagtggccaacaca

SEQ ID NO: 6160 - DNA, 813 bp, Homo Sapiens
gtcacagagcatgttctcgccaacaatgatgtttcctgtgaccacccctctaacaccgtgccctctgggagcaaccaggacctgggagctggggccggggaagacgcccggtcggatgacagcagcagccgcatcatcaatggatccgactgcgatatgcacacccagccgtggcaggccgcgctgttgctaaggcccaaccagctctactgcggggcggtgttggtgcatccacagtggctgctcacggccgcccactgcaggaagaaagttttcagagtccgtctcggccactactccctgtcaccagtttatgaatctgggcagcagatgttccagggggtcaaatccatcccccaccctggctactcccaccctggccactctaacgacctcatgctcatcaaactgaacagaagaattcgtcccactaaagatgtcagacccatcaacgtctcctctcattgtccctctgctgggacaaagtgcttggtgtctggctgggggacaaccaagagcccccaagtgcacttccctaaggtcctccagtgcttgaatatcagcgtgctaagtcagaaaaggtgcgaggatgcttacccgagacagatagatgacaccatgttctgcgccggtgacaaagcaggtagagactcctgccagggtgattctggggggcctgtggtctgcaatggctccctgcagggactcgtgtcctggggagattacccttgtgcccggcccaacagaccgggtgtctacacgaacctctgcaagttcaccaagtggatccaggaaaccatccaggccaactcc

SEQ ID NO: 6161 - DNA, 306 bp, Homo Sapiens
tgctatacacttttctacctgtttgcctcctttgtgtctgtactaccctggggctcctgcaacaacccttggaatacaccagaatgcaaagataaaaccaaacttttattagattcctgtgttatcagtgaccatcccaaaatacagatcaagaactcgactttctgcatgaccgcttatcccaacgtgacaatggttaatttcaccagccaggccaataagacatttgtcagtggaagtgaagagtacttcaagtactttgtgctgaagatttctgcagggattgaatatcctggcgagatcagg

SEQ ID NO: 6162 - DNA, 933 bp, Homo Sapiens
gacggcgacctgacgctactatgggccgagtggcagggacgacgcccagaatgggagctgactgatatggtggtgtgggtgactggagcctcgagtggaattggtgaggagctggcttaccagttgtctaaactaggagtttctcttgtgctgtcagccagaagagtgcatgagctggaaagggtgaaaagaagatgcctagagaatggcaatttaaaagaaaaagatatacttgttttgccccttgacctgaccgacactggttcccatgaagcggctaccaaagctgttctccaggagtttggtagaatcgacattctggtcaacaatggtggaatgtcccagcgttctctgtgcatggataccagcttggatgtctacagaaagctaatagagcttaactacttagggacggtgtccttgacaaaatgtgttctgcctcacatgatcgagaggaagcaaggaaagattgttactgtgaatagcatcctgggtatcatatctgtacctctttccattggatactgtgctagcaagcatgctctccggggtttttttaatggccttcgaacagaacttgccacatacccaggtataatagtttctaacatttgcccaggacctgtgcaatcaaatattgtggagaattccctagctggagaagtcacaaagactataggcaataatggagaccagtcccacaagatgacaaccagtcgttgtgtgcggctgatgttaatcagcatggccaatgatttgaaagaagtttggatctcagaacaacctttcttgttagtaacatatttgtggcaatacatgccaacctgggcctggtggataaccaacaagatggggaagaaaaggattgagaactttaagagtggtgtggatgcagactcttcttattttaaaatctttaagacaaaacatgac

SEQ ID NO: 6163 - DNA, 2247 bp, Homo Sapiens
cagtatgacagctggccccattaccccgagtacttccagcaaccggctcctgagtatcaccagccccaggcccccgccaacgtggccaagattcagctgcgcctggctgggcagaagaggaagcacagcgagggccgggtggaggtgtactatgatggccagtggggcaccgtgtgcgatgacgacttctccatccacgctgcccacgtcgtctgccgggagctgggctacgtggaggccaagtcctggactgccagctcctcctacggcaagggagaagggcccatctggttagacaatctccactgtactggcaacgaggcgacccttgcagcatgcacctccaatggctggggcgtcactgactgcaagcacacggaggatgtcggtgtggtgtgcagcgacaaaaggattcctgggttcaaatttgacaattcgttgatcaaccagatagagaacctgaatatccaggtggaggacattcggattcgagccatcctctcaacctaccgcaagcgcaccccagtgatggagggctacgtggaggtgaaggagggcaagacctggaagcagatctgtgacaagcactggacggccaagaattcccgcgtggtctgcggcatgtttggcttccctggggagaggacatacaataccaaagtgtacaaaatgtttgcctcacggaggaagcagcgctactggccattctccatggactgcaccggcacagaggcccacatctccagctgcaagctgggcccccaggtgtcactggaccccatgaagaatgtcacctgcgagaatgggctaccggccgtggtgagttgtgtgcctgggcaggtcttcagccctgacggaccctcgagattccggaaagcgtacaagccagagcaacccctggtgcgactgagaggcggtgcctacatcggggagggccgcgtggaggtgctcaaaaatggagagtgggggaccgtctgcgacgacaagtgggacctggtgtcggccagtgtggtctgcagagagctgggctttgggagtgccaaagaggcagtcactggctcccgactggggcaagggatcggacccatccacctcaacgagatccagtgcacaggcaatgagaagtccattatagactgcaagttcaatgccgagtctcagggctgcaaccacgaggaggatgctggtgtgagatgcaacacccctgccatgggcttgcagaagaagctgcgcctgaacggcggccgcaatccctacgagggccgagtggaggtgctggtggagagaaacgggtcccttgtgtgggggatggtgtgtggccaaaactggggcatcgtggaggccatggtggtctgccgccagctgggcctgggattcgccagcaacgccttccaggagacctggtattggcacggagatgtcaacagcaacaaagtggtcatgagtggagtgaagtgctcgggaacggagctgtccctggcgcactgccgccacgacggggaggacgtggcctgcccccagggcggagtgcagtacggggccggagttgcctgctcagaaaccgcccctgacctggtcctcaatgcggagatggtgcagcagaccacctacctggaggaccggcccatgttcctgctgcagtgtgccatggaggagaactgcctctcggcctcagccgcgcagaccgaccccaccacgggctaccgccggctcctgcgcttctcctcccagatccacaacaatggccagtccgacttccggcccaagaacggccgccacgcgtggatctggcacgactgtcacaggcactaccacagcatggaggtgttcacccactatgacctgctgaacctcaatggcaccaaggtggcagagggccacaaggccagcttctgcttggaggacacagaatgtgaaggagacatccagaagaattacgagtgtgccaacttcggcgatcagggcatcaccatgggctgctgggacatgtaccgccatgacatcgactgccagtgggttgacatcactgacgtgccccctggagactacctgttccaggttgttattaaccccaacttcgaggttgcagaatccgattactccaacaacatcatgaaatgcaggagccgctatgacggccaccgcatctggatgtacaactgccacataggtggttccttcagcgaagagacggaaaaaaagtttgagcacttcagcgggctcttaaacaaccagctgtccccgcag

SEQ ID NO: 6164 - DNA, 1380 bp, Homo Sapiens
gaacattctgaaaatgtgcatatttcaggagtgtcaactgcttgtggagagactccagagcaaatacgagcaccaagtggcataatcacaagcccaggctggccttctgaatatcctgcaaaaatcaactgtagctggttcataagggcaaacccaggcgaaatcattactataagttttcaggattttgatattcaaggatccagaaggtgcaatttggactggttgacaatagaaacatacaagaatattgaaagttacagagcttgtggttccacaattccacctccgtatatctcttcacaagaccacatctggattaggtttcattcggatgacaacatctctagaaagggtttcagactggcatatttttcagggaaatctgaggaaccaaattgtgcttgtgatcagtttcgttgtggtaatggaaagtgtataccagaagcctggaaatgtaataacatggatgaatgtggagatagttccgatgaagagatctgtgccaaagaagcaaatcctccaactgctgctgcttttcaaccctgtgcttacaaccagttccagtgtttatcccgttttaccaaagtttacacttgcctccccgaatctttaaaatgtgatgggaacattgactgccttgacctaggagatgagatagactgtgatgtgccaacatgtgggcaatggctaaaatatttttatggtacttttaattctcccaattatccagacttttatcctcctggaagcaattgcacctggttaatagacactggtgatcaccgtaaagtcattttacgcttcactgactttaaacttgatggtactggttatggtgattatgtcaaaatatatgatggattagaggagaatccacacaagcttttgcgtgtgttgacagcttttgattctcatgcacctcttacagttgtttcttcttctggacagataagggtacatttttgtgctgataaagtgaatgctgcaaggggatttaatgctacttaccaagtagatgggttctgtttgccatgggaaataccctgtggaggtaactgggggtgttatactgagcagcagcgttgtgatgggtattggcattgcccaaatggaagggatgaaaccaattgtaccatgtgccagaaggaagaatttccatgttcccgaaatggtgtctgttatcctcgttctgatcgctgcaactaccagaatcattgcccaaatggctcagatgaaaaaaactgctttttttgccaaccaggaaatttccattgtaaaaacaatcgttgtgtgtttgaaagttgggtgtgtgattctcaagatgactgtggtgatggcagcgatgaagaaaattgcccagtaatcgtgcctacaaga

SEQ ID NO: 6165 - DNA, 168 bp, Homo Sapiens
tggactgactgttggatggtgaatgctgatgactctctggaggtgagcacaaaatgccgaggcctctggtgggaatgcgtcacaaatgcttttgatgggattcgcacctgtgatgagtacgattccatacttgcggagcatcccttgaagctggtggtaactcgagcg

SEQ ID NO: 6166 - DNA, 672 bp, Homo Sapiens
atcataaacggcgaggactgcagcccgcactcgcagccctggcaggcggcactggtcatggaaaacgaattgttctgctcgggcgtcctggtgcatccgcagtgggtgctgtcagccgcacactgtttccagaactcctacaccatcgggctgggcctacacagtcttgaggccgaccaagagccagggagccagatggtggaggccagcctctccgtacggcacccagagtacaacagacccttgctcgctaacgacctcatgctcatcaagttggacgaatccgtgtccgagtctgacaccatccggagcatcagcattgcttcgcagtgccctaccgcggggaactcttgcctcgtttctggctggggtctgctggcgaacggcagaatgcctaccgtgctgcagtgcgtgaacgtgtcggtggtgtctgaggaggtctgcagtaagctctatgacccgctgtaccaccccagcatgttctgcgccggcggagggcaagaccagaaggactcctgcaacggtgactctggggggcccctgatctgcaacgggtacttgcagggccttgtgtctttcggaaaagccccgtgtggccaagttggcgtgccaggtgtctacaccaacctctgcaaattcactgagtggatagagaaaaccgtccaggccagt

SEQ ID NO: 6167 - DNA, 1302 bp, Homo Sapiens
acccgcgacgtccgggagccgcccgccctcaagtatggcatcgtcctggacgctggttcttcacacacgtccatgtttatctacaagtggccggcagacaaggagaacgacacaggcattgtgggccagcacagctcctgtgatgttccaggtgggggcatctccagctatgcagacaacccttctggggccagccagagtcttgttggatgcctcgaacaggcgcttcaggatgtgcccaaagagagacacgcgggcacacccctctacctgggagccacagcgggtatgcgcctgctcaacctgaccaatccagaggcctcgaccagtgtgctcatggcagtgactcacacactgacccagtacccctttgacttccggggtgcacgcatcctctcgggccaggaagagggggtgtttggctgggtgactgccaactacctgctggagaacttcatcaagtacggctgggtgggccggtggttccggccacggaaggggacactgggggccatggacctggggggtgcctctacccagatcacttttgagacaaccagtccagctgaggacagagccagcgaggtccagctgcatctctacggccagcactaccgagtctacacccacagcttcctctgctatggccgtgaccaggtcctccagaggctgctggccagtgccctccagacccacggcttccacccctgctggccgaggggcttttccacccaagtgctgctcggggatgtgtaccagtcaccatgcaccatggcccagcggccccagaacttcaacagcagtgccagggtcagcctgtcagggagcagtgacccccacctctgccgagatctggtttctgggctcttcagcttctcctcctgccccttctcccgatgctctttcaatggggtcttccagcccccagtggctgggaactttgtcgccttctctgccttcttctacactgtggactttttgcggacttcgatggggctgcccgtggccaccctgcagcagctggaagcagccgcagtgaatgtctgcaaccagacctgggctcagctgcaagctcgggtgccagggcaacgggcccgcctggccgactactgcgccggggccatgttcgtgcagcagctgctgagtcgcggctacggcttcgacgagcgcgccttcggcggcgtgatcttccagaagaaggccgcggacactgcagtgggctgggcgctcggctacatgctgaacctgaccaacctgatccccgccgacccgccggggctgcgcaagggcacagacttcagc

SEQ ID NO: 6168 - DNA, 507 bp, Homo Sapiens
cggggtcaaacagaggagagcatgaatgagagtcatcctcgcaagtgtgcagagtcttttgagatgtgggatgatcgtgactctcactgtaggcgccctaagtttgaagggcatccccctgagtcttggaagtggatccttgcaccggtcattctttatatctgtgaaaggatcctccggttttaccgctcccagcagaaggttgtgattaccaaggttgttatgcacccatccaaagttttggaattgcagatgaacaagcgtggcttcagcatggaagtggggcagtatatctttgttaattgcccctcaatctctctcctggaatggcatccttttactttgacctctgctccagaggaagatttcttctccattcatatccgagcagcaggggactggacagaaaatctcataagggctttcgaacaacaatattcaccaattcccaggattgaagtggatggtccctttggcacagccagtgaggatgttttccagtatgaa

SEQ ID NO: 6169 - DNA, 1440 bp, Homo Sapiens
agccccgtaccttttggtccagagggacggctggaagataagctccacaaacccaaagctacacagactgaggtcaaaccatctgtgaggtttaacctccgcacctccaaggacccagagcatgaaggatgctacctctccgtcggccacagccagcccttagaagactgcagtttcaacatgacagctaaaacctttttcatcattcacggatggacgatgagcggtatctttgaaaactggctgcacaaactcgtgtcagccctgcacacaagagagaaagacgccaatgtagttgtggttgactggctccccctggcccaccagctttacacggatgcggtcaataataccagggtggtgggacacagcattgccaggatgctcgactggctgcaggagaaggacgatttttctctcgggaatgtccacttgatcggctacagcctcggagcgcacgtggccgggtatgcaggcaacttcgtgaaaggaacggtgggccgaatcacaggtttggatcctgccgggcccatgtttgaaggggccgacatccacaagaggctctctccggacgatgcagattttgtggatgtcctccacacctacacgcgttccttcggcttgagcattggtattcagatgcctgtgggccacattgacatctaccccaatgggggtgacttccagccaggctgtggactcaacgatgtcttgggatcaattgcatatggaacaatcacagaggtggtaaaatgtgagcatgagcgagccgtccacctctttgttgactctctggtgaatcaggacaagccgagttttgccttccagtgcactgactccaatcgcttcaaaaaggggatctgtctgagctgccgcaagaaccgttgtaatagcattggctacaatgccaagaaaatgaggaacaagaggaacagcaaaatgtacctaaaaacccgggcaggcatgcctttcagagtttaccattatcagatgaaaatccatgtcttcagttacaagaacatgggagaaattgagcccaccttttacgtcaccctttatggcactaatgcagattcccagactctgccactggaaatagtggagcggatcgagcagaatgccaccaacaccttcctggtctacaccgaggaggacttgggagacctcttgaagatccagctcacctgggagggggcctctcagtcttggtacaacctgtggaaggagtttcgcagctacctgtctcaaccccgcaaccccggacgggagctgaatatcaggcgcatccgggtgaagtctggggaaacccagcggaaactgacattttgtacagaagaccctgagaacaccagcatatccccaggccaggagctctggtttcgcaagtgtcgggatggctggaggatgaaaaacgaaaccagtcccactgtggagcttccc

SEQ ID NO: 6170 - DNA, 2337 bp, Homo Sapiens
tggcatttgcagtaccgggacgtgcgtgtccagaaggtcttcaatggctacatgaggatcacaaatgagaattttgtggatgcctacgagaactccaactccactgagtttgtaagcctggccagcaaggtgaaggacgcgctgaagctgctgtacagcggagtcccattcctgggcccctaccacaaggagtcggctgtgacggccttcagcgagggcagcgtcatcgcctactactggtctgagttcagcatcccgcagcacctggtggaggaggccgagcgcgtcatggccgaggagcgcgtagtcatgctgcccccgcgggcgcgctccctgaagtcctttgtggtcacctcagtggtggctttccccacggactccaaaacagtacagaggacccaggacaacagctgcagctttggcctgcacgcccgcggtgtggagctgatgcgcttcaccacgcccggcttccctgacagcccctaccccgctcatgcccgctgccagtgggccctgcggggggacgccgactcagtgctgagcctcaccttccgcagctttgaccttgcgtcctgcgacgagcgcggcagcgacctggtgacggtgtacaacaccctgagccccatggagccccacgccctggtgcagttgtgtggcacctaccctccctcctacaacctgaccttccactcctcccagaacgtcctgctcatcacactgataaccaacactgagcggcggcatcccggctttgaggccaccttcttccagctgcctaggatgagcagctgtggaggccgcttacgtaaagcccaggggacattcaacagcccctactacccaggccactacccacccaacattgactgcacatggaacattgaggtgcccaacaaccagcatgtgaaggtgcgcttcaaattcttctacctgctggagcccggcgtgcctgcgggcacctgccccaaggactacgtggagatcaatggggagaaatactgcggagagaggtcccagttcgtcgtcaccagcaacagcaacaagatcacagttcgcttccactcagatcagtcctacaccgacaccggcttcttagctgaatacctctcctacgactccagtgacccatgcccggggcagttcacgtgccgcacggggcggtgtatccggaaggagctgcgctgtgatggctgggccgactgcaccgaccacagcgatgagctcaactgcagttgcgacgccggccaccagttcacgtgcaagaacaagttctgcaagcccctcttctgggtctgcgacagtgtgaacgactgcggagacaacagcgacgagcaggggtgcagttgtccggcccagaccttcaggtgttccaatgggaagtgcctctcgaaaagccagcagtgcaatgggaaggacgactgtggggacggctccgacgaggcctcctgccccaaggtgaacgtcgtcacttgtaccaaacacacctaccgctgcctcaatgggctctgcttgagcaagggcaaccctgagtgtgacgggaaggaggactgtagcgacggctcagatgagaaggactgcgactgtgggctgcggtcattcacgagacaggctcgtgttgttgggggcacggatgcggatgagggcgagtggccctggcaggtaagcctgcatgctctgggccagggccacatctgcggtgcttccctcatctctcccaactggctggtctctgccgcacactgctacatcgatgacagaggattcaggtactcagaccccacgcagtggacggccttcctgggcttgcacgaccagagccagcgcagcgcccctggggtgcaggagcgcaggctcaagcgcatcatctcccaccccttcttcaatgacttcaccttcgactatgacatcgcgctgctggagctggagaaaccggcagagtacagctccatggtgcggcccatctgcctgccggacgcctcccatgtcttccctgccggcaaggccatctgggtcacgggctggggacacacccagtatggaggcactggcgcgctgatcctgcaaaagggtgagatccgcgtcatcaaccagaccacctgcgagaacctcctgccgcagcagatcacgccgcgcatgatgtgcgtgggcttcctcagcggcggcgtggactcctgccagggtgattccgggggacccctgtccagcgtggaggcggatgggcggatcttccaggccggtgtggtgagctggggagacggctgcgctcagaggaacaagccaggcgtgtacacaaggctccctctgtttcgggactggatcaaagagaacactggggta

SEQ ID NO: 6171 - DNA, 657 bp, Homo Sapiens
ctggtccaaggctctttgcgtgcagaagagctttccatccaggtgtcatgcagaattatggggatcacccttgtgagcaaaaaggcgaaccagcagctgaatttcacagaagctaaggaggcctgtaggctgctgggactaagtttggccggcaaggaccaagttgaaacagccttgaaagctagctttgaaacttgcagctatggctgggttggagatggattcgtggtcatctctaggattagcccaaaccccaagtgtgggaaaaatggggtgggtgtcctgattaggaaggttccagtgagccgacagtttgcagcctattgttacaactcatctgatacttggactaactcgtgcattccagaaattatcaccaccaaagatcccatattcaacactcaaactgcaacacaaacaacagaatttattgtcagtgacagtacctactcggtggcatccccttactctacaatacctgcccctactactactcctcctgctccagcttccacttctattccacggagaaaaaaattgatttgtgtcacagaagtttttatggaaactagcaccatgtctacagaaactgaaccatttgttgaaaataaagcagcattcaagaatgaagctgctgggtttggaggtgtccccacg

SEQ ID NO: 6172 - DNA, 1359 bp, Homo Sapiens
gccccggagctggcccccgcgcccttcacgctgcccctccgggtggccgcggccacgaaccgcgtagttgcgcccaccccgggacccgggacccctgccgagcgccacgccgacggcttggcgctcgccctggagcctgccctggcgtcccccgcgggcgccgccaacttcttggccatggtagacaacctgcagggggactctggccgcggctactacctggagatgctgatcgggacccccccgcagaagctacagattctcgttgacactggaagcagtaactttgccgtggcaggaaccccgcactcctacatagacacgtactttgacacagagaggtctagcacataccgctccaagggctttgacgtcacagtgaagtacacacaaggaagctggacgggcttcgttggggaagacctcgtcaccatccccaaaggcttcaatacttcttttcttgtcaacattgccactatttttgaatcagagaatttctttttgcctgggattaaatggaatggaatacttggcctagcttatgccacacttgccaagccatcaagttctctggagaccttcttcgactccctggtgacacaagcaaacatccccaacgttttctccatgcagatgtgtggagccggcttgcccgttgctggatctgggaccaacggaggtagtcttgtcttgggtggaattgaaccaagtttgtataaaggagacatctggtatacccctattaaggaagagtggtactaccagatagaaattctgaaattggaaattggaggccaaagccttaatctggactgcagagagtataacgcagacaaggccatcgtggacagtggcaccacgctgctgcgcctgccccagaaggtgtttgatgcggtggtggaagctgtggcccgcgcatctctgattccagaattctctgatggtttctggactgggtcccagctggcgtgctggacgaattcggaaacaccttggtcttacttccctaaaatctccatctacctgagagatgagaactccagcaggtcattccgtatcacaatcctgcctcagctttacattcagcccatgatgggggccggcctgaattatgaatgttaccgattcggcatttccccatccacaaatgcgctggtgatcggtgccacggtgatggagggcttctacgtcatcttcgacagagcccagaagagggtgggcttcgcagcgagcccctgtgcagaaattgcaggtgctgcagtgtctgaaatttccgggcctttctcaacagaggatgtagccagcaactgtgtccccgctcagtctttgagcgagcccattttgtggattgtgtcctat

SEQ ID NO: 6173 - DNA, 1518 bp, Homo Sapiens
gatgtgaaggctcggagctgcggagaggtccgccaggcgtacggtgccaagggattcagcctggcggacatcccctaccaggagatcgcaggggaacacttaagaatctgtcctcaggaatatacatgctgcaccacagaaatggaagacaagttaagccaacaaagcaaactcgaatttgaaaaccttgtggaagagacaagccattttgtgcgcaccacttttgtgtccaggcataagaaatttgacgaatttttccgagagctcctggagaatgcagaaaagtcactaaatgatatgtttgtacggacctatggcatgctgtacatgcagaattcagaagtcttccaggacctcttcacagagctgaaaaggtactacactgggggtaatgtgaatctggaggaaatgctcaatgacttttgggctcggctcctggaacggatgtttcagctgataaaccctcagtatcacttcagtgaagactacctggaatgtgtgagcaaatacactgaccagctcaagccatttggagacgtgccccggaaactgaagattcaggttacccgcgccttcattgctgccaggacctttgtccaggggctgactgtgggcagagaagttgcaaaccgagtttccaaggtcagcccaaccccagggtgtatccgtgccctcatgaagatgctgtactgcccatactgtcgggggcttcccactgtgaggccctgcaacaactactgtctcaacgtcatgaagggctgcttggcaaatcaggctgacctcgacacagagtggaatctgtttatagatgcaatgctcttggtggcagagcgactggaggggccattcaacattgagtcggtcatggacccgatagatgtcaagatttctgaagccattatgaacatgcaagaaaacagcatgcaggtgtctgcaaaggtctttcagggatgtggtcagcccaaacctgctccagccctcagatctgcccgctcagctcctgaaaattttaatacacgtttcaggccctacaatcctgaggaaagaccaacaactgctgcaggcacaagcttggaccggctggtcacagacataaaagagaaattgaagctctctaaaaaggtctggtcagcattaccctacactatctgcaaggacgagagcgtgacagcgggcacgtccaacgaggaggaatgctggaacgggcacagcaaagccagatacttgcctgagatcatgaatgatgggctcaccaaccagatcaacaatcccgaggtggatgtggacatcactcggcctgacactttcatcagacagcagattatggctctccgtgtgatgaccaacaaactaaaaaacgcctacaatggcaatgatgtcaatttccaggacacaagtgatgaatccagtggctcagggagtggcagtgggtgcatggatgacgtgtgtcccacggagtttgagtttgtcaccacagaggcccccgcagtggatcccgaccggagagaggtggactct

SEQ ID NO: 6174 - DNA, 1284 bp, Homo Sapiens
gatgttgctaaagcaatcatcaacctagctgtttatggtaaagcccagaacagatcctatgagcgattggcacttctggttgatactgttggacccagactgagtggctccaagaacctagaaaaagccatccaaattatgtaccaaaacctgcagcaagatgggctggagaaagttcacctggagccagtgagaataccccactgggagaggggagaagaatcagctgtgatgctggagccaagaattcataagatagccatcctgggtcttggcagcagcattgggactcctccagaaggcattacagcagaagttctggtggtgacctctttcgatgaactgcagagaagggcctcagaagcaagagggaagattgttgtttataaccaaccttacatcaactactcaaggacggtgcaataccgaacgcagggggcggtggaagctgccaaggttggggctttggcatctctcattcgatccgtggcctccttctccatctacagtcctcacacaggtattcaggaataccaggatggcgtgcccaagattccaacagcctgtattacggtggaagatgcagaaatgatgtcaagaatggcttctcatgggatcaaaattgtcattcagctaaagatgggggcaaagacctacccagatactgattccttcaacactgtagcagagatcactgggagcaaatatccagaacaggttgtactggtcagtggacatctggacagctgggatgttgggcagggtgccatggatgatggcggtggagcctttatatcatgggaagcactctcacttattaaagatcttgggctgcgtccaaagaggactctgcggctggtgctctggactgcagaagaacaaggtggagttggtgccttccagtattatcagttacacaaggtaaatatttccaactacagtctggtgatggagtctgacgcaggaaccttcttacccactgggctgcaattcactggcagtgaaaaggccagggccatcatggaggaggttatgagcctgctgcagcccctcaatatcactcaggtcctgagccatggagaagggacagacatcaacttttggatccaagctggagtgcctggagccagtctacttgatgacttatacaagtatttcttcttccatcactcccacggagacaccatgactgtcatggatccaaagcagatgaatgttgctgctgctgtttgggctgttgtttcttatgttgttgcagacatggaagaaatgctgcctaggtcc

SEQ ID NO: 6175 - DNA, 597 bp, Homo Sapiens
cagagacaaaagaaagaggagagcaccgaagaagtgaaaatagaagttttgcatcgtccagaaaactgctctaagacaagcaagaagggagacctactaaatgcccattatgacggctacctggctaaagacggctcgaaattctactgcagccggacacaaaatgaaggccaccccaaatggtttgttcttggtgttgggcaagtcataaaaggcctagacattgctatgacagatatgtgccctggagaaaagcgaaaagtagttatacccccttcatttgcatacggaaaggaaggctatgcagaaggcaagattccaccggatgctacattgatttttgagattgaactttatgctgtgaccaaaggaccacggagcattgagacatttaaacaaatagacatggacaatgacaggcagctctctaaagccgagataaacctctacttgcaaagggaatttgaaaaagatgagaagccacgtgacaagtcatatcaggatgcagttttagaagatatttttaagaagaatgaccatgatggtgatggcttcatttctcccaaggaatacaatgtataccaacacgatgaacta

SEQ ID NO: 6176 - DNA, 381 bp, Homo Sapiens
acactcctgcgctcatacatgcagagcgtgtggaccgaagagtctcaatgcaccttgctgaatgcgtccatcacggaaacatttaactgctccttcagctgtggtccagactgctggaaactttctcagtacccctgcctccaggtgtacgttaacctgacttcttccggggaaaagctcctcctctaccacacagaagagacaataaaaatcaatcagaagtgctcctatatacctaaatgtggaaaaaattttgaagaatccatgtccctggtgaatgttgtcatggaaaacttcaggaagtatcaacacttctcctgctattctgacccagaaggaaaccagaagagtgttatcctaaccaaactctacagttccaac

SEQ ID NO: 6177 - DNA, 186 bp, Homo Sapiens
acctcctgcgtggggttctttatgccttactggctctggggatcacagctgggcaagcctgtgtccttcggtaccttccggaggtgctcatatcctgtgcatgatgagagtcggcagatgatggtgatggtggaggaatgtgggcgctatgcctccttccagggcatccccagcgcagaatggagg

SEQ ID NO: 6178 - DNA, 942 bp, Homo Sapiens
gagacaaacttggaacagctctgggtagaagtgggcagccgggtgagccaggagctgcattacaccaaggagaagctgggggaggaggctgcatacacctctcagatgctgatacagaccgcacgccaggagggagagaacatcctcacacccgaagcacttggcctccacctccaggcagccctcactgccagtaaagtccaagtatcactctatgggaagtcctgggatttgaacaaaatctgctacaagtcaggagttccccttattgaaaatggaatgattgagcggatgattgagaagctgtttccgtgcgtgatcctcacccccctcgactgcttctgggagggagccaaactccaagggggctccgcctacctgcccggccgcccggatatccagtggaccaacctggatccagagcagctgctggaggagctgggtccctttgcctcccttgagggcttccgggagctgctagacaaggcacaggtgggccaggcctacgtggggcggccctgtctgcaccctgatgacctccactgcccacctagtgcccccaaccatcacagcaggcaggctcccaatgtggctcacgagctgagtgggggctgccatggcttctcccacaaattcatgcactggcaggaggaattgctgctgggaggcatggccagagacccccaaggagagctgctgagggcagaggccctgcagagcaccttcttgctgatgagtccccgccagctgtacgagcatttccggggtgactatcagacacatgacattggctggagtgaggagcaggccagcacagtgctacaagcctggcagcggcgctttgtgcagctggcccaggaggccctgcctgagaacgcttcccagcagatccatgccttctcctccaccaccctggatgacatcctgcatgcgttctctgaa

SEQ ID NO: 6179 - DNA, 843 bp, Homo Sapiens
ggggtggaagtgagtgctgggtcaccccccatccgcaacgtcactgtggcctacaagttccacatggggctctatggtgagactgggcggcttttcactgagagctgcagcatctctcccaagctccgctccatcgctgtctactatgacaacccccacatggtgccccctgataagtgccgatgtgccgtgggcagcatcctgagtgaaggtgaggaatcgccctcccctgagctcatcgacctctaccagaaatttggcttcaaggtgttctccttcccggcacccagccatgtggtgacagccaccttcccctacaccaccattctgtccatctggctggctacccgccgtgtccatcctgccttggacacctacatcaaggagcggaagctgtgtgcctatcctcggctggagatctaccaggaagaccagatccatttcatgtgcccactggcacggcagggagacttctatgtgcctgagatgaaggagacagagtggaaatggcgggggcttgtggaggccattgacacccaggtggatggcacaggagctgacacaatgagtgacacgagttctgtaagcttggaagtgagccctggcagccgggagacttcagctgccacactgtcacctggggcgagcagccgtggctgggatgacggtgacacccgcagcgagcacagctacagcgagtcaggtgccagcggctcctcttttgaggagctggacttggagggcgaggggcccttaggggagtcacggctggaccctgggactgagcccctggggactaccaagtggctctgggagcccactgcccctgagaagggcaaggag

SEQ ID NO: 6180 - DNA, 336 bp, Homo Sapiens
tttttcatactctgtgaaaacaaatcagttgccggactaaccatgacctatgatggaaataatccagtgacatctcatagagatgtaccactttcttattgcaactcagactgcaattgtgatgaaagtcaatgggaaccagtctgtggaaacaatggaataacttacatctcaccctgtctagcaggttgcaaatcttcaagtggcaataaaaagcctatagtgttttacaactgcagttgtttggaagtaactggtctccagaacagaaattactcagcccatttgggtgaatgcccaagagatgatgcttgtacaaggaaattttactttttt

SEQ ID NO: 6181 - DNA, 741 bp, Homo Sapiens
atcgtgggtggagaggacgccgaactcgggcgttggccgtggcaggggagcctgcgcctgtgggattcccacgtatgcggagtgagcctgctcagccaccgctgggcactcacggcggcgcactgctttgaaacctatagtgaccttagtgatccctccgggtggatggtccagtttggccagctgacttccatgccatccttctggagcctgcaggcctactacacccgttacttcgtatcgaatatctatctgagccctcgctacctggggaattcaccctatgacattgccttggtgaagctgtctgcacctgtcacctacactaaacacatccagcccatctgtctccaggcctccacatttgagtttgagaaccggacagactgctgggtgactggctgggggtacatcaaagaggatgaggcactgccatctccccacaccctccaggaagttcaggtcgccatcataaacaactctatgtgcaaccacctcttcctcaagtacagtttccgcaaggacatctttggagacatggtttgtgctggcaatgcccaaggcgggaaggatgcctgcttcggtgactcaggtggacccttggcctgtaacaagaatggactgtggtatcagattggagtcgtgagctggggagtgggctgtggtcggcccaatcggcccggtgtctacaccaatatcagccaccactttgagtggatccagaagctgatggcccagagt

SEQ ID NO: 6182 - DNA, 1824 bp, Homo Sapiens
atggaaagatttcgtctggagaagaagttacctggtcctgatgaagaagctgttgtggatcttggcaaaactagctcaactgtgaacaccaagtttgaaaaagaagaactagaaagtcatagagctgtatatattggtgttcacgtcccgtttagtaaagagagtcgtcggcgtcataggcatcgcggacacaaacatcaccaccggagaagaaaagataaagaatcagataaagaagatggacgggaatctccttcttatgatacaccatcccagagagttcagtttatccttggtactgaagatgatgatgaagaacatattccccatgatctcttcacggaaatggatgaactgtgttacagagatggagaagaatatgaatggaaagaaactgctagatggctgaaatttgaagaggatgttgaagatggcggtgaccgatggagtaaaccttatgtggcaactctctctttgcacagtctttttgaactaaggagttgcatcctcaatggaacagtcatgctggatatgagagcaagcactctagatgaaatagcagatatggtattagacaacatgatagcttctggccaattagacgagtccatacgagagaatgtcagagaagctcttctgaagagacatcatcatcagaatgagaaaagattcaccagtcggattcctcttgttcgatcttttgcagatataggcaagaaacattctgaccctcacttgcttgaaaggaatggggaaggcctttcagcctcccgccactctttgcgaacaggtctgtctgcctcaaacctttccttgagaggagaatcacctttatctcttcttcttggtcatcttcttccttcttcaagagctggaacccctgcaggctcaaggtgtacaaccccagtacccacccctcaaaacagtcctccttctagccctagcatcagccgcctgacctccagaagttcccaagagagtcagcgtcaggccccagaactactggtttcacctgccagtgatgatattcccacagtagtaattcatccgcctgaggaagacttagaagcagcgctgaaaggcgaggagcagaagaatgaggaaaatgttgacttaactccaggtattttggcctctccccagtctgctcctggaaacttggacaatagtaaaagtggagaaattaaaggtaatggaagtggtggaagcagagaaaatagtactgttgacttcagcaaggttgatatgaatttcatgagaaaaattcctacgggtgctgaggcatccaacgtcctggtgggcgaagtagactttttggaaaggccaataattgcatttgtgagactggctcctgctgtcctccttacagggttgactgaggtccctgttccaaccaggtttttgtttttgttattgggtccagcgggcaaggcaccacagtaccatgaaattggacgatcaatagccactctcatgacagatgagattttccatgatgtagcttataaagcaaaagacagaaatgacctcttatctggaattgatgaatttttagatcaagtaactgtcctacctccaggagagtgggatccttctatacgcatagaaccaccaaaaagtgtcccttctcaggaaaagagaaagattcctgtgtttcacaatggatctacccccacactgggtgagactcctaaagaggccgctcatcatgctgggcctgagctacagaggactggacggctttttggtggtttgatacttgacatcaaaaggaaagcaccttttttcttgagtgacttcaaggatgcattaagcctgcagtgc

SEQ ID NO: 6183 - DNA, 621 bp, Homo Sapiens
gacggcagcgagccggcggccggggcggggcggggcggagcccgcgccgtgcgggtggacgtgagactgccgcgccaggacgctctggtcctggagggcgtcaggatcggctccgaagccgacccggcgcccctgctgggcggtcgtctgctgctgatggacatcgtggatgccgagcaggaggcaccagtggaaggctggattgcagtggcatacgtgggcaaggagcaggcggcccagttccaccaggagaataagggcagtggcccgcaggcctatcccaaggccctggtccagcagatgcggcgggccctcttcctgggtgcctctgccctgcttcttctcatcctgaaccacaacgtggtccgagagctggacatatcccagcttctgctcaggccagtgatcgtcctccattattcctccaatgtcaccaagctgttggatgcattgctgcagaggacccaggccacggctgagatcaccagcggagagtccctgtctgccaatatcgagtggaagttgaccttgtggaccacctgtggcctctccaaggatggctatggaggatggcaggacttggtctgccttggaggcagtcgtgcccaggagcagaaaccc

SEQ ID NO: 6184 - DNA, 1176 bp, Homo Sapiens
tttagaagtgactcttcctctagtttgccacctaagttactactagtatcctttgatggcttcagagctgattatctgaagaactatgaatttcctcatctccagaattttatcaaagaaggtgttttggtagagcatgttaaaaatgtttttatcacaaaaacatttccaaaccactacagtattgtgacaggcttgtatgaagaaagccatggcattgtggctaattccatgtatgatgcagtcacaaagaaacacttttctgactctaatgacaaggatcctttttggtggaatgaggcagtacctatttgggtgaccaatcagcttcaggaaaacagatcaagtgctgctgctatgtggcctggtactgatgtacccattcacgataccatctcttcctattttatgaattacaactcctcagtgtcatttgaggaaagactaaataatattactatgtggctaaacaattcgaacccaccagtcacctttgcaacactatattgggaagaaccagatgcaagtggccacaaatacggacctgaagataaagaaaacatgagcagagtgttgaaaaaaatagatgatcttatcggtgacttagtccaaagactcaagatgttagggctatgggaaaatcttaatgtgatcattacaagtgatcatgggatgacccagtgttctcaggacagactgataaacctggattcctgcatcgatcattcatactacactcttatagatttgagcccagttgctgcaatacttcccaaaataaatagaacagaggtttataacaaactgaaaaactgtagccctcatatgaatgtttatctcaaagaagacattcctaacagattttattaccaacataatgatcgaattcagcccattattttggttgccgatgaaggctggacaattgtgctaaatgaatcatcacaaaaattaggtgaccatggttatgataattctttgcctagtatgcatccatttctagctgcccacggacctgcatttcacaaaggctacaagcatagcacaattaacattgtggatatttatccaatgatgtgccacatcctgggattaaaaccacatcccaataatgggacctttggtcatactaagtgcttgttagttgaccagtggtgcattaatctcccagaagcc

SEQ ID NO: 6185 - DNA, 426 bp, Homo Sapiens
cagaagcagtattgggtctgcaactcatccgatgcaagtatttcatacacctactgtgataaaatgcaatacccaatttcaattaatgttaacccctgtatagaattgaaaggatccaaaggattattgcacattttctacattccaaggagagatttaaagcaattatatttcaatctctatataactgtcaacaccatgaatcttccaaagcgcaaagaagttatttgccgaggatctgatgacgattactctttttgcagagctctgaagggagagactgtgaatacaacaatatcattctccttcaagggaataaaattttctaagggaaaatacaaatgtgttgttgaagctatttctgggagcccagaagaaatgctcttttgcttggagtttgtcatcctacaccaacctaattcaaat

SEQ ID NO: 6186 - DNA, 23 bp, Artificial Sequence
  chemically synthesized
ctgttattgctagcgttttagca

SEQ ID NO: 6187 - DNA, 18 bp, Artificial Sequence
  chemically synthesized
gccaccagaagcggccgc

SEQ ID NO: 6188 - DNA, 50 bp, Artificial Sequence
  chemically synthesized
ttgttaatatacctctatactttaacgtcaaggagaaaaaaccccggatc

SEQ ID NO: 6189 - DNA, 64 bp, Artificial Sequence
  chemically synthesized
  misc_feature (25)..(39): any nucleotide
ctgcatcctttagtgagggttgaannnnnnnnnnnnnnnttcgatccggggttttttctccttg

SEQ ID NO: 6190 - DNA, 59 bp, Artificial Sequence
  chemically synthesized
ttcaaccctcactaaaggatgcagttacttcgctgtttttcaatattttctgttattgc

SEQ ID NO: 6191 - DNA, 42 bp, Artificial Sequence
  chemically synthesized
tgctaaaacgctagcaataacagaaaatattgaaaaacagcg

SEQ ID NO: 6192 - DNA, 62 bp, Artificial Sequence
  chemically synthesized
  misc_feature (34)..(43): any nucleotide
tcgtcggcagcgtcagatgtgtataagagacagnnnnnnnnnngagaaaaaaccccggatcg

SEQ ID NO: 6193 - DNA, 69 bp, Artificial Sequence
  chemically synthesized
  misc_feature (35)..(44): any nucleotide
gtctcgtgggctcggagatgtgtataagagacagnnnnnnnnnnacgctagcaataacagaaaatattg
